(19) United States
(12) Patent Application Publication
(10) Pub. No.: US 2019/0300891 A1
(43) Pub. Date: Oct. 3, 2019

(54) DEVELOPMENT OF FUNGAL RESISTANT CROPS BY HIGS (HOST-INDUCED GENE SILENCING) MEDIATED INHIBITION OF GPI-ANCHORED CELL WALL PROTEIN SYNTHESIS

(71) Applicant: KWS SAAT SE, Einbeck (DE)

(72) Inventors: Holger DEISING, Halle (Saale) (DE); Ely OLIVEIRA GARCIA, Manhattan, KS (US); Dietmar STAHL, Einbeck (DE); Nora TEMME, Selm (DE); Wilhelm SCHÄFER, Hamburg (DE)

(73) Assignee: KWS SAAT SE, Einbeck (DE)

(21) Appl. No.: 16/317,335

(22) PCT Filed: Jul. 7, 2017
(86) PCT No.: PCT/EP2017/067114

§ 371 Date: Jan. 11, 2019

(30) Foreign Application Priority Data
Jul. 11, 2016 (EP) 16178896.3

(51) Int. Cl. C12N 15/82; C12N 15/113

(52) U.S. Cl. CPC C12N 15/8218; C12N 2310/11; C12N 15/113

(57) ABSTRACT

The present invention is directed to a transgenic plant or a part thereof comprising a DNA capable of expressing an inhibitory nucleic acid molecule capable of inhibiting the expression of a gene involved in the glycosylphosphatidylinositol anchor biosynthesis pathway in a fungus, to such DNA, to the inhibitory nucleic acid molecule, to a vector comprising the DNA, to methods of producing the plant, of conferring fungal resistance to the plant, or of inhibiting the expression of a gene involved in the glycosylphosphatidylinositol anchor biosynthesis pathway, to the use of the DNA for inactivating a fungus, for protecting a plant against a fungus, or for inhibiting the expression of a gene involved in the glycosylphosphatidylinositol anchor biosynthesis pathway and to a composition comprising the DNA, vector or a dsRNA capable of inhibiting the expression of a gene involved in the glycosylphosphatidylinositol anchor biosynthesis pathway in a fungus.

[0001] Crops are often infected by plant pathogenic fungi. These infections lead to yield losses that can sometimes reach dramatic proportions. The problem of fungal infection has been addressed by phyto-sanitary measures, fungicide treatment and classical introgression of resistance genes in the sense of good agricultural practice. These measures do not lead to a lasting protection of plants from infection with phyto-pathogenic fungi because phyto-sanitary measures only lead to a certain decrease in the concentrations of infective agents, fungicide treatments often result in the emergence of fungicide resistant pathogens, and new crossed resistance genes are usually be broken after a short time. Recently a genetic method was introduced, which allows the generation of fungal resistant plants by expression of RNA interference (RNAi) against fungal target genes (Nowara et al., 2010, Plant Cell 22, 3130-3141). This method is called host-induced gene silencing (HIGS).

[0002] The fungal cell wall has structural and physiological functions and is of vital importance for fungal pathogens. The cell wall is a framework that protects the fungal cell against osmolysis, forms the shape of the hyphae and allows the adhesion and deposition of enzymes and UV protective pigments. The cell wall controls the access of large molecules into the cell and protects against lytic enzymes of other organisms. Some phyto-pathogenic fungi form specific infection structures, appressoria, stabilized by strong cell walls by means of high turgor pressure that allows the pathogens access to the host tissue.

[0003] In contrast to fungi infecting mammalian hosts, the vast majority of plant pathogenic fungi differentiate into specialized infection cells in order to invade their host plant and to establish a compatible interaction. For example, Colletotrichum species, including the maize anthracnose and stem rot fungus Colletotrichum graminicola, form a dome-shaped melanized appressorium on the plant. This infection cell develops a turgor pressure of approx. 5.35 MPa (corresponding to 53.5 bar), which is translated into a force at the appressorial base corresponding to 16.8 μN (Bechinger et al., 1999, Optical measurements of invasive forces exerted by appressoria of a plant pathogenic fungus. Science, 285, 1896-1899). Conceivably, rigid cell walls are required in functional appressoria, as indicated by spontaneously exploding infection cells of RNAi strains with reduced β-glucan contents (Oliveira-Garcia E. and Deising H. B., 2013, Infection Structure-Specific Expression of β-1,3-Glucan Synthase Is Essential for Pathogenicity of Colletotrichum graminicola and Evasion of β-Glucan-Triggered Immunity in Maize. Plant Cell 25, 2356-2378). Infection structure-specific expression of β-1,3-glucan synthase is essential for pathogenicity of Colletotrichum graminicola and evasion of β-glucan-triggered immunity (Oliveira-Garcia and Deising, 2013). Attenuation of PAMP-triggered immunity in maize requires down-regulation of the key β-1,6-glucan synthesis genes KRE5 and KRE6 in biotrophic hyphae of Colletotrichum graminicola. After breaching the plant cell wall, biotrophic infection vesicle, primary hyphae, and necrotrophic secondary hyphae are sequentially differentiated. Interestingly, necrotrophic infection hyphae of the RNAi strains mentioned above exhibit large swellings indicative of severe cell wall defects, and this also holds true for a chitin synthase V deletion mutant (Werner S., Sugui J. A., Steinberg G., Deising H. B., 2007. A chitin synthase with a myosin-like motor domain is essential for hyphal growth, appressorium differentiation, and pathogenicity of the maize anthracnose fungus Colletotrichum graminicola. Mol. Plant Microbe Interact. 20: 1555-1567).

[0004] Glycosylphosphatidylinositols (GPIs) are structurally complex glycolipids, which, after translocation into the ER lumen, are post-translationally added to the C-terminus of a series of proteins. Covalent attachment of GPI to the C-terminus is one of the most common post-translational modifications of proteins in eukaryotic cells and important for anchoring of proteins to the cell surface (Yu, S. et al., 2013. Recent progress in synthetic and biological studies of GPI anchors and GPI-anchored proteins, Curr Opin Chem Biol. 17(6), 1006-1013). In baker's yeast, 61 proteins have been estimated to be GPI-anchored (Pittet, M. and Conzelmann, A., 2007. Biosynthesis and function of GPI proteins in the yeast Saccharomyces cerevisiae. Biochimica et Biophysica Acta, 1771, 405-420), with half of these residing in the cell wall by covalent attachment to cell wall glucans. Structural analyses have shown that GPI-linked cell wall proteins are tightly associated with β-1,6-glucan. In addition, a subset of GPI-anchored cell wall proteins such as Cwp1, Cwp2, Tir1 and Tir2 of yeast possesses the DGQΦQ motif (where Φ represents any hydrophobic amino acid residue) that is thought to mediate a direct link to β-1,3-glucan (Levin, D. E., 2011. Regulation of Cell Wall Biogenesis in Saccharomycescerevisiae: The Cell Wall Integrity Signaling Pathway. Genetics, Vol. 189, 1145-1175). Thus, GPI anchors seem to play a role in cross-connecting cell wall β-glucan polymers and GPI-linked cell wall proteins play a major role in cell wall structure and rigidity.

[0005] Detailed studies in the model yeast Saccharomyces cerevisiae have shown that GPI anchor biosynthesis is involved in cell wall formation, likely due to the fact that several cell wall-remodeling enzymes require GPI-anchoring and targeting to the cell surface (Pittet and Conzelmann, 2007). The importance of selected genes involved in GPI anchor biosynthesis, i.e. genes accessible to gene deletion, has also been investigated in filamentous fungi, including Neurospora crassa (Bowman, S. M. et al., 2006. Mutational analysis of the glycosylphosphatidylinositol (GPI) anchor pathway demonstrates that GPI-anchored proteins are required for cell wall biogenesis and normal hyphal growth in Neurospora crassa, Eukaryot Cell 5: 587-600. doi:10.1128/EC.5.3.587-600.2006.), the opportunistic human pathogen Aspergillus fumigatus (Li, H. et al., 2007. Glycosylphosphatidylinositol (GPI) anchor is required in Aspergillus fumigatus for morphogenesis and virulence, Mol Microbiol 64: 1014-1027. doi:10.1111/j.1365-2958.2007.05709.x.), and the plant pathogenic fungi Fusarium graminearum (Rittenour W. R. and Harris S. D. (2013) Glycosylphosphatidylinositol-Anchored Proteins in Fusarium graminearum: Inventory, Variability, and Virulence, PLoS ONE 8(11): e81603. doi:10.1371/journal.pone.0081603). These fungi, however, do not undergo infection-related morphogenesis.

[0006] While the biosynthesis of GPI and its subsequent transfer to proteins as well as the role of GPI anchor biosynthesis for cell wall formation have been extensively studied in the model yeast Saccharomyces cerevisiae, as well as in Neurospora crassa, Aspergillus fumigatus, and Fusarium graminearum, these fungi are either not pathogenic for plants or do not undergo infection-related morphogenesis when infecting plants. However, there was to date no data whether genes involved in the GPI anchor biosynthesis would also play a role with respect to pathogenicity of fungi infecting plants, including fungi which undergo infection-related morphogenesis when infecting plants. Moreover, there was to date no data as to the suitability of genes involved in the GPI anchor as target genes in gene silencing approaches, let alone in an HIGS approach, for broad and permanent pathogen resistance in plants.

[0007] Thus, there exists a need for appropriate fungal target genes, the inhibition of which is suitable to confer broad and permanent resistance on plants against fungi, including fungi which undergo infection-related morphogenesis. To address this issue, we employed RNAi to characterize the genes involved in the GPI anchor biosynthesis pathway and found that down-regulation of transcript abundance of genes of the GPI anchor biosynthesis pathway causes severe cell wall defects in vegetative hyphae, in appressoria and in in planta differentiated infection hyphae, and leads to loss of pathogenicity of the fungus.

[0008] In particular, RNAi was employed to characterize four genes involved in the GPI anchor biosynthesis pathway of C. graminicola and F. graminearum, i.e. GPI12 encoding a N-acetylglucosaminylphosphatidylinositol deacetylase, GAA1 and GPI8 encoding the catalytic subunits of the transglutaminase complex, examined in C. graminicola, and GWT1 relevant for the vegetative growth of F. graminearum.

[0009] The data shown here suggest that GPI anchor biosynthesis is required for vegetative hyphal growth, conidiation, differentiation of functional appressoria, and development of invasive pathogenic hyphae and that inhibition of GPI anchor biosynthesis reduces pathogenicity of fungi.

[0010] In a first aspect, the present invention relates to a transgenic plant or a part thereof comprising as transgene a DNA capable of expressing an inhibitory nucleic acid molecule capable of inhibiting the expression of a gene involved in the glycosylphosphatidylinositol (GPI) anchor biosynthesis pathway in a fungus.

[0011] In an embodiment thereof, the gene comprises the GPI1, GPI2, GPI3, GPI15, ERI1, GPI19, GPI12, GWT1, GPI14, PBN1, GPI18, MCD4, GPI10, SMP3, GPI13, GPI11, GPI7, GAA1, GPI8, GPI16, GPI17, GAB1, and/or BST1 gene(s), preferably the GPI12, GAA1, GPI8 and/or GWT1 gene(s).

[0012] In an embodiment of the above, the transgenic plant or the part thereof comprises as transgene an expression cassette comprising the DNA.

[0013] In an embodiment of the above, the DNA or the expression cassette is stably integrated into the genome of the plant or present in the plant or the part thereof on a vector.

[0014] In an embodiment of the above, the inhibitory nucleic acid molecule is an antisense RNA or dsRNA (double stranded RNA), whereby the dsRNA is preferably hpRNA, siRNA or miRNA.

[0015] In an embodiment of the above, the DNA encodes an RNA molecule in sense direction and an RNA molecule in antisense direction, wherein the RNA molecule in sense direction or the RNA molecule in antisense direction are substantially complementary to the gene involved in the GPI anchor biosynthesis pathway or a part thereof, the RNA molecule in antisense direction is substantially reverse complementary to the RNA molecule in sense direction, and the RNA molecule in sense direction and the RNA molecule in antisense direction are able to build a dsRNA.

[0016] In an embodiment of the above, the length of the antisense RNA, the dsRNA, the RNA molecule in sense direction or the RNA molecule in antisense direction is at least 15, 16, 17, 18, 19 or 20 contiguous nucleotides, preferably at least 21, 22, 23, 24, 25, 30, 40, 50, 60, 70, 80, 90 or 100 contiguous nucleotides, more preferably at least 150, 200, 250, 300, 350, 450, 500, 600, 700, 800, 900 or 1000 contiguous nucleotides, still more preferably 300-1700, 300-1000, 300-700 contiguous nucleotides for the gene involved in the glycosylphosphatidylinositol (GPI) anchor biosynthesis pathway in a fungus or for the cDNA of the gene involved in the glycosylphosphatidylinositol (GPI) anchor biosynthesis pathway in a fungus, and most preferably 493 contiguous nucleotides for the GPI12 gene, 560 contiguous nucleotides for the GAA1 gene, or 690 contiguous nucleotides for the GPI8 gene.

[0017] In an embodiment of the above, the expression of the inhibitory nucleic acid molecule is controlled by a promoter, preferably an inducible promoter, more preferably a pathogen inducible and/or tissue specific promoter.

[0018] Each of the embodiments of the first aspect also refers back to each preceding embodiment.

[0019] In a second aspect, the present invention relates to a DNA capable of expressing an inhibitory nucleic acid molecule capable of inhibiting the expression of a gene involved in GPI anchor biosynthesis pathway in a fungus, whereby preferably the DNA is as defined in the first aspect of the invention, or an expression cassette comprising the DNA.

[0020] In a third aspect, the present invention relates to an inhibitory nucleic acid molecule capable of inhibiting the expression of a gene involved in GPI anchor biosynthesis pathway in a fungus, whereby preferably the inhibitory nucleic acid molecule is as defined in the first aspect of the invention.

[0021] In a fourth aspect, the present invention relates to a vector comprising the DNA or the expression cassette as referred to in the second aspect of the present invention.

[0022] In a fifth aspect, the present invention relates to method of producing the transgenic plant or the part thereof of the first aspect, comprising the following steps: introducing into at least a cell of the plant the DNA or the expression cassette as referred to in the second aspect of the present invention or the vector as referred to in the fourth aspect of the present invention or a dsRNA capable of inhibiting the expression of a gene involved in GPI anchor biosynthesis pathway, preferably a dsRNA capable of inhibiting the expression of the GPI1, GPI2, GPI3, GPI15, ERI1, GPI19, GPI12, GWT1, GPI14, PBN1, GPI18, MCD4, GPI10, SMP3, GPI13, GPI11, GPI7, GAA1, GPI8, GPI16, GPI17, GAB1, and/or BST1 gene(s), more preferably a dsRNA capable of inhibiting the expression of the GPI12, GAA1, GPI8 and/or GWT1 gene(s), in a fungus, and regenerating the transgenic plant from the at least a cell.

[0023] In a sixth aspect, the present invention relates to method of conferring fungal resistance on a plant or the part thereof comprising the following steps: introducing into the plant or the part thereof the DNA or the expression cassette of the second aspect or the vector of the fourth aspect or a dsRNA capable of inhibiting the expression of a gene involved in GPI anchor biosynthesis pathway, preferably a dsRNA capable of inhibiting the expression of the GPI1, GPI2, GPI3, GPI15, ERI1, GPI19, GPI12, GWT1, GPI14, PBN1, GPI18, MCD4, GPI10, SMP3, GPI13, GPI11, GPI7, GAA1, GPI8, GPI16, GPI17, GAB1, and/or BST1 gene(s), more preferably a dsRNA capable of inhibiting the expression of the GPI12, GAA1, GPI8 and/or GWT1 gene(s), in a fungus, and causing expression of the DNA, the expression cassette, the vector, or the dsRNA.

[0024] In a seventh aspect, the present invention relates to a method of inhibiting the expression of a gene involved in GPI anchor biosynthesis pathway, comprising: applying the DNA or the expression cassette of the second aspect or the vector of the fourth aspect or a dsRNA capable of inhibiting the expression of a gene involved in GPI anchor biosynthesis pathway, preferably a dsRNA capable of inhibiting the expression of the GPI1, GPI2, GPI3, GPI15, ERI1, GPI19, GPI12, GWT1, GPI14, PBN1, GPI18, MCD4, GPI10, SMP3, GPI13, GPI11, GPI7, GAA1, GPI8, GPI16, GPI17, GAB1, and/or BST1 gene(s), more preferably a dsRNA capable of inhibiting the expression of the GPI12, GAA1, GPI8 and/or GWT1 gene(s), in a fungus to the fungus or to a plant or a part thereof.

[0025] In an eighth aspect, the present invention relates to a use of the DNA or the expression cassette of the second aspect or the vector of the fourth aspect or a dsRNA capable of inhibiting the expression of a gene involved in GPI anchor biosynthesis pathway, preferably a dsRNA capable of inhibiting the expression of the GPI1, GPI2, GPI3, GPI15, ERI1, GPI19, GPI12, GWT1, GPI14, PBN1, GPI18, MCD4, GPI10, SMP3, GPI13, GPI11, GPI7, GAA1, GPI8, GPI16, GPI17, GAB1, and/or BST1 gene(s), more preferably a dsRNA capable of inhibiting the expression of the GPI12, GAA1, GPI8 and/or GWT1 gene(s), in a fungus for inactivating a fungus, while contacting a plant or a part thereof; for protecting a plant against an infection by a fungus; or for inhibiting the expression of a gene involved in the glycosylphosphatidylinositol (GPI) anchor biosynthesis pathway, preferably the GPI1, GPI2, GPI3, GPI15, ERI1, GPI19, GPI12, GWT1, GPI14, PBN1, GPI18, MCD4, GPI10, SMP3, GPI13, GPI11, GPI7, GAA1, GPI8, GPI16, GPI17, GAB1, and/or BST1 gene(s), more preferably the GPI12, GAA1, GPI8 and/or GWT1 gene(s), in a fungus.

[0026] In a ninth aspect, the present invention relates to a composition comprising the DNA or the expression cassette of the second aspect or the vector of the fourth aspect or a dsRNA capable of inhibiting the expression of a gene involved in GPI anchor biosynthesis pathway, preferably a dsRNA capable of inhibiting the expression of the GPI1, GPI2, GPI3, GPI15, ERI1, GPI19, GPI12, GWT1, GPI14, PBN1, GPI18, MCD4, GPI10, SMP3, GPI13, GPI11, GPI7, GAA1, GPI8, GPI16, GPI17, GAB1, and/or BST1 gene(s), more preferably a dsRNA capable of inhibiting the expression of the GPI12, GAA1, GPI8 and/or GWT1 gene(s), in a fungus.

[0027] The invention also relates to a transgenic plant or a part thereof comprising a DNA or an expression cassette comprising the DNA, wherein the DNA encodes an aRNA or dsRNA directed against the GPI1, GPI2, GPI3, GPI15, ERI1, GPI19, GPI12, GWT1, GPI14, PBN1, GPI18, MCD4, GPI10, SMP3, GPI13, GPI11, GPI7, GAA1, GPI8, GPI16, GPI17, GAB1, and/or BST1 DNA and/or mRNA, preferably against the GPI12, GAA1, GPI8 and/or GWT1 DNA and/or mRNA, wherein more preferably the dsRNA is hpRNA, siRNA or miRNA, or the aRNA is part of the dsRNA, siRNA or miRNA.

[0028] The invention also relates to a transgenic plant or a part thereof comprising a DNA or an expression cassette comprising the DNA, wherein the DNA encodes an aRNA or dsRNA directed against the GPI12 DNA and/or mRNA, wherein preferably the dsRNA is hpRNA, siRNA or miRNA, or the aRNA is part of the dsRNA, siRNA or miRNA.

[0029] The invention also relates to a transgenic plant or a part thereof comprising a DNA or an expression cassette comprising the DNA, wherein the DNA encodes an aRNA or dsRNA directed against the GAA1 DNA and/or mRNA, wherein preferably the dsRNA is hpRNA, siRNA or miRNA, or the aRNA is part of the dsRNA, siRNA or miRNA.

[0030] The invention also relates to a transgenic plant or a part thereof comprising a DNA or an expression cassette comprising the DNA, wherein the DNA encodes an aRNA or dsRNA directed against the GPI8 DNA and/or mRNA, wherein preferably the dsRNA is hpRNA, siRNA or miRNA, or the aRNA is part of the dsRNA, siRNA or miRNA.

[0031] The invention also relates to a transgenic plant or a part thereof comprising a DNA or an expression cassette comprising the DNA, wherein the DNA encodes an aRNA or dsRNA directed against the GWT1 DNA and/or mRNA, wherein preferably the dsRNA is hpRNA, siRNA or miRNA, or the aRNA is part of the dsRNA, siRNA or miRNA.

[0032] The invention also relates to a transgenic plant or a part thereof comprising (a) DNA(s) or (an) expression cassette(s) comprising the DNA(s), wherein the DNA(s) encode(s) (an) aRNA(s) or dsRNA(s) directed against any combination of at least two of the GPI12, GAA1, GPI8 and/or GWT1 DNAs and/or mRNAs, wherein preferably the dsRNA is hpRNA, siRNA or miRNA, or the aRNA is part of the dsRNA, siRNA or miRNA.

[0033] The invention also relates to a transgenic plant or a part thereof comprising a DNA or an expression cassette comprising the DNA, wherein the DNA comprises an antisense and a sense sequence whereby the antisense sequence is capable of hybridizing to fungal GPI12 mRNA.

[0034] The invention also relates to a transgenic plant or a part thereof comprising a DNA or an expression cassette comprising the DNA, wherein the DNA comprises an antisense and a sense sequence whereby the antisense sequence is capable of hybridizing to fungal GAA1 mRNA.

[0035] The invention also relates to a transgenic plant or a part thereof comprising a DNA or an expression cassette comprising the DNA, wherein the DNA comprises an antisense and a sense sequence whereby the antisense sequence is capable of hybridizing to fungal GPI8 mRNA.

[0036] The invention also relates to a transgenic plant or a part thereof comprising a DNA or an expression cassette comprising the DNA, wherein the DNA comprises an antisense and a sense sequence whereby the antisense sequence is capable of hybridizing to fungal GWT1 mRNA.

[0037] The invention also relates to a transgenic plant or a part thereof comprising (a) DNA(s) or (an) expression cassette(s) comprising the DNA(s), wherein the DNA(s) comprise(s) (an) antisense and (a) sense sequence(s), whereby the antisense sequence(s) is (are) capable of hybridizing to any combination of at least two of the GPI12, GAA1, GPI8 and/or GWT1 mRNAs.

[0038] The invention also relates to a transgenic plant or a part thereof comprising a DNA or an expression cassette comprising the DNA, wherein the DNA encodes an RNA molecule in sense direction and an RNA molecule in antisense direction, wherein the RNA molecule in sense direction or the RNA molecule in antisense direction are present on one RNA molecule.

[0039] The invention also relates to a transgenic plant or a part thereof comprising a DNA or an expression cassette comprising the DNA, wherein the DNA encodes an RNA molecule in sense direction and an RNA molecule in antisense direction, wherein the RNA molecule in sense direction or the RNA molecule in antisense direction are present on different RNA molecules.

[0040] The invention also relates to a transgenic plant or a part thereof comprising a DNA or an expression cassette comprising the DNA, wherein the DNA encodes an RNA molecule in sense direction and an RNA molecule in antisense direction, wherein the RNA molecule is siRNA or miRNA.

[0041] The present inventors have surprisingly demonstrated that inhibition of fungal genes involved in the GPI anchor biosynthesis pathway by a polynucleotide introduced into a plant confers resistance on the plant against fungi via gene silencing. The polynucleotide causes cessation of infection, growth, development, reproduction and/or pathogenicity and eventually results in the death of the fungal organism. This demonstration renders the present invention superior over the prior art, as targeting GPI anchor biosynthesis will disturb the function of a large number of proteins (in yeast 61 proteins are predicted to be GPI anchor proteins (Pittet, M. and Conzelmann, A., 2007), in contrast to the specific inhibition of single polysaccharide biosynthesis genes (e.g. β-1,3-glucan synthase, β-1,6-glucan synthase, chitin synthase) which are the target of inhibition in the prior art. Moreover, all known fungal GPI-anchored proteins end up either at the plasma membrane or in the cell wall. The inhibition of the GPI anchor protein biosynthesis does not only disturb the cell wall architecture but also triggers additional defense reactions of the plant. GPI-cell wall proteins, which are not attached to the GPI anchor, are frequently secreted by the fungal cells (Pittet and Conzelmann, 2007) and might act as pathogen-associated molecular pattern (PAMP). The induction of PAMP mediated resistance by GPI-cell wall protein secretion, which enhance plant resistance, is another difference to the already known approaches. Finally, the GPI anchor protein biosynthesis pathway has never been selected for a HIGS approach until now.

[0042] The invention demonstrates for the first time that vegetative fungal growth and asexual spore formation are impaired in a phytopathogenic fungus by inhibiting the expression of GPI12, GAA1 and/or GPI18 gene(s). GPI12-, GAA1- and/or GPI18-RNAi fungal strains had a lower rate of conidiation as compared to wildtype strains and the spores were shorter with increased diameters, resulting from reduced cell wall rigidity of the conidia. Moreover, it has been shown that germination rates as well as appressorium formation rates were reduced. Finally, it was shown that GPI12-, GAA1- and/or GPI18-RNAi fungal strains had pathogenicity or virulence defects, so that the strains were unable to invade into intact plants. Additionally, the invention demonstrates for the first time that fungal growth of a GWT1-RNAi fungal strain is impaired. Tested in plants harboring a GWT1-RNAi construct, the plants showed reduced pathogenicity symptoms.

[0043] Thus, by using reverse genetic methods, the inventors were able to show that the GPI12, GAA1, GPI18 and GWT1 genes are excellent HIGS target genes capable of selectively interrupting the GPI anchor biosynthesis pathway. The excellent suitability of these genes as targets for inhibiting pathogenicity of fungi is substantiated by several properties, inter alia, these genes are single-copy genes such that in case of an RNAi approach it can be excluded that a second allele will save the host-induced gene silencing and no complete reduction of transcript concentrations is required in order to induce pathogenicity which is another crucial point.

[0044] The present inventors have shown by using exemplary genes involved at different stages in the GPI anchor biosynthesis pathway, being the GPI12, GAA1, GPI8 and GWT1 genes, that inhibition of the GPI anchor biosynthesis pathway causes cessation of infection, growth, development, reproduction and/or pathogenicity of fungi. The skilled person will recognize the also the other genes involved in the GPI anchor biosynthesis pathway represent true targets, the inhibition of which has the same effect, namely cessation of infection, growth, development, reproduction and/or pathogenicity of fungi.

[0045] The genes involved in the GPI anchor biosynthesis pathways which may be targeted individually or in combination by an inhibitory nucleic acid molecule are excellent targets. Since these genes have homologs in the genomes of a wide variety of fungi, these genes may be used to confer permanent resistance on a wide variety of plant species including a large variety of economically important crop species against a wide variety of plant-pathogenic fungi.

[0046] The term “a gene”, “a gene involved in the GPI anchor biosynthesis pathway in a fungus” or “a gene involved in the GPI anchor biosynthesis pathway”, as referred to herein, refers to any fungal gene or corresponding cDNA which encodes a protein which is involved in the biosynthesis of GPI, thus including genes which are so far known to be involved in the GPI anchor biosynthesis pathway, as referred to below, and genes which are involved in the GPI anchor biosynthesis pathway, however, will be identified in the future. A gene in a fungus is usually a DNA, as the fungal genome consists of DNA. However, the term “gene”, as understood herein, also comprises fungal RNA, preferably fungal mRNA, which is transcribed from the gene and is translated into a protein, as well as cDNA derived from fungal mRNA. The inhibitory nucleic acid molecule capable of inhibiting the expression of a gene as comprised by the present invention is capable of inhibiting fungal DNA and/or RNA such as mRNA which is transcribed from the DNA. The RNA and mRNA are understood as being “involved in the GPI anchor biosynthesis pathway”.

[0047] Biosynthesis of GPI and its subsequent transfer to proteins has been extensively studied in baker's yeast. As far as it is known, the different biosynthetic steps are mediated by approx. 25 proteins as shown in FIG. 1 and take place successively on the cytoplasmic and on the luminal face of the ER membrane. The GPI anchor biosynthesis pathway is composed of 12 biosynthetic steps, starting with the addition of N-acetyl glucosamine to the membrane anchored phospholipid phosphatidylinositol and terminating with the addition of a protein via its C terminus to the complete GPI. A schematic presentation of the GPI anchor biosynthesis pathway is given in FIG. 1. The biosynthesis of GPI starts with the addition of N-acetyl glucosamine to phosphatidylinositol which reaction occurs on the cytoplasmic ER surface. The acetyl group of the N-acetyl glucosaminyl residue is then removed and the glucosamine formed is enzymatically 2-O-palmitolyated, using acyl-CoA as the acyl donor. The resulting intermediate is translocated to the luminal side of the phospholipid bilayer. In the ER lumen, two mannosyl units are subsequently linked to the glucosamine. Next, a phosphoryl-ethanolamine residue is added to the first mannosyl unit. In yeast, the addition of a fourth onto the third mannosyl residue, previously attached, is required for adding a phosphoethanolamine group to the third mannosyl residue. The last step of GPI biosynthesis before attaching this anchor to a protein is the addition of a third phosphoryl-ethanolamine residue. Then, a protein is attached to GPI.

[0048] More specifically, the first step of GPI biosynthesis is the addition of N-acetyl glucosamine to phosphatidylinositol. This reaction occurs on the cytoplasmic ER surface and is catalyzed by N-acetyl glucosaminyl transferase, an unusually complex glycosyl transferase consisting of the six core proteins GPI1, GPI2, GPI3, GPI15, ERI1, and GPI19. The acetyl group of the N-acetyl glucosaminyl residue is then removed by the cytoplasmic N-acetylglucosaminylphosphatidylinositol deacetylase encoded by GPI12, and the glucosamine formed is enzymatically 2-O-palmitolyated, using acyl-CoA as the acyl donor. Palmitic acid is added onto the 2-OH group of inositol by GWT1, an acyl-CoA dependent inositol acyltransferase. The resulting intermediate is translocated to the luminal side of the phospholipid bilayer. In the ER lumen, two mannosyl units are subsequently linked to the glucosamine by the two distinct ER-resident dolichol phosphate mannose:glucosaminyl phosphatidylinositol α1-4-mannosyltransferases: GPI14 and GPI18. PBN1, a type I transmembrane glycoprotein, forms a complex with GPI14, thereby stabilizing it. Interestingly, analysis of the substrate specificity of the first dolichol phosphate mannose:glucosaminyl phosphatidylinositol al-4-mannosyltransferase of the glycosyl-phosphatidylinositol biosynthetic pathway of African trypanosomes showed that N-acetylglucosaminylphosphatidylinositol is more efficiently presented to the enzyme than its deacetylated form, suggesting important substrate channelling via the preceding deacetylase GPI12. Next, the addition of a phosphoryl-ethanolamine residue to the first mannosyl unit, is catalyzed by MCD4. The phosphoryl-ethanolamine group linked to the first mannosyl residue is required for both recognition of the GPI by the mannosyl transferase GPI10 attaching the third mannosyl, as well as by the transamidase complex. In yeast, the addition of a fourth onto the third mannosyl residue by SMP3 is required for adding a phosphoethanolamine group to the third mannosyl residue, as catalyzed by GPI13. The last step of GPI biosynthesis before attaching this anchor to a protein is the addition of a third phosphoryl-ethanolamine residue, which is mediated by ethanolamine phosphotransferase GPI7. The attachment of GPI to a protein is catalyzed by the GPI transamidase complex, a protein complex consisting of the five distinct subunits GPI8, GPI16, GAA1, GAB1, and GPI17, organized into three components. According to a recent model, the central part and the catalytic domain of the GPI transamidase complex is GPI8. GPI8 interacts with GAA1 and with all other subunits of the GPI transamidase complex. GPI8 is a cystein protease cleaving the C-terminal pro-peptide of the substrate protein even in the absence of the GPI anchor (Maxwell, S. E., Ramalingam, S., Gerber, L. D., Brink, L., and Udenfriend S. (1995) An active carbonyl formed during glycosylphosphatidylinositol addition to a protein is evidence of catalysis by a transamidase. J Biol Chem. 270(33):19576-19). Importantly, GAA1 has recently been suggested to function as a metallo-peptide-synthetase catalyzing formation of the peptide bond between the substrate protein's w-site and the GPI lipid anchor's phosphoethanolamine. The complex reactions involved in biosynthesis of GPI and attachment of the GPI anchor to proteins are conserved from yeast to men. In the last step, the inositol deacylase BST1 removes the palmitic acid moiety from the mature GPI anchored proteins and allows the export of GPI proteins from the ER to the Golgi.

[0049] Thus, the term “a gene”, “a gene involved in the GPI anchor biosynthesis pathway in a fungus” or “a gene involved in the GPI anchor biosynthesis pathway” refers to any fungal gene which encodes a protein which is involved in the GPI anchor biosynthesis pathway, starting with the addition of N-acetyl glucosamine to phosphatidylinositol and ending with the deacylation of phosphatidylinositol (step 12). Intermediate steps are shown in FIG. 1. However, as used herein, the term “a gene”, “a gene involved in the GPI anchor biosynthesis pathway in a fungus” or “a gene involved in the GPI anchor biosynthesis pathway” refers to any gene of a GPI anchor biosynthesis pathway, for example a GPI anchor biosynthesis pathway starting with the addition of N-acetyl glucosamine to phosphatidylinositol and ending with step 12, also if the GPI anchor biosynthesis pathway is different from the pathway shown in FIG. 1. Furthermore as used herein, the term “gene” comprises DNA involved in the GPI anchor biosynthesis pathway, RNA involved in the GPI anchor biosynthesis pathway and/or mRNA involved in the GPI anchor biosynthesis pathway as well as cDNA derived from mRNA involved in the GPI anchor biosynthesis pathway.

[0050] Preferably, the term “a gene”, “a gene involved in the GPI anchor biosynthesis pathway in a fungus” or “a gene involved in the GPI anchor biosynthesis pathway”, as used herein, comprises GPI1, GPI2, GPI3, GPI15, ERI1, GPI19, GPI12, GWT1, GPI14, PBN1, GPI18, MCD4, GPI10, SMP3, GPI13, GPI11, GPI7, GAA1, GPI8, GPI16, GPI17, GAB1, and/or BST1 gene(s), more preferably GPI12, GAA1, GPI8 and/or GWT1 gene(s).

[0051] GPI1, GPI2, GPI3, GPI15, ERI1, GPI19, GPI12, GWT1, GPI14, PBN1, GPI18, MCD4, GPI10, SMP3, GPI13, GPI11, GPI7, GAA1, GPI8, GPI16, GPI17, GAB1, and BST1 genes which are comprised by the present invention as target genes in gene silencing approaches are those which are known in the art as fungal GPI1, GPI2, GPI3, GPI15, ERI1, GPI19, GPI12, GWT1, GPI14, PBN1, GPI18, MCD4, GPI10, SMP3, GPI13, GPI11, GPI7, GAA1, GPI8, GPI16, GPI17, GAB1, and BST1 gene, respectively, or are known under a different designation, which is a synonym to the above designations. Exemplary nucleotide and protein sequences of GPI1, GPI2, GPI3, GPI15, ERI1, GPI19, GPI12, GWT1, GPI14, PBN1, GPI18, MCD4, GPI10, SMP3, GPI13, GPI11, GPI7, GAA1, GPI8, GPI16, GPI17, GAB1, or BST1 of a series of fungi are indicated in Tables 1-5 and in the exemplary part by their accession numbers as available from the NCBI database (National Centre for Biotechnology Information; National Library of Medicine 38A, Bethesda, Md. 20894, USA; www.ncbi.nih.gov). The specific nucleotide and amino acid sequences are disclosed in the accompanying sequence listing under SEQ ID NOs: 1 to 400.

[0052] Moreover, fungal GPI1, GPI2, GPI3, GPI15, ERI1, GPI19, GPI12, GWT1, GPI14, PBN1, GPI18, MCD4, GPI10, SMP3, GPI13, GPI11, GPI7, GAA1, GPI8, GPI16, GPI17, GAB1, and BST1 genes which are comprised by the present invention are those which are homologous to or homologs of known GPI1, GPI2, GPI3, GPI15, ERI1, GPI19, GPI12, GWT1, GPI14, PBN1, GPI18, MCD4, GPI10, SMP3, GPI13, GPI11, GPI7, GAA1, GPI8, GPI16, GPI17, GAB1, and BST1 genes, respectively, such as e.g. those identified for GPI12, GAA1, GWT1 and GPI8 in the sequence listing under odd numbers of SEQ ID Nos: 1 to 350 and 389-394. Homologs are characterized by an identity of at least 30, 40, 50, 60, 70, 80, 85, 90, 95 or 99% to known genes. In analogy, fungal GPI1, GPI2, GPI3, GPI15, ERI1, GPI19, GPI12, GWT1, GPI14, PBN1, GPI18, MCD4, GPI10, SMP3, GPI13, GPI11, GPI7, GAA1, GPI8, GPI16, GPI17, GAB1, and BST1 proteins which are comprised by the present invention are those which are homologous to or homologs of known GPI1, GPI2, GPI3, GPI15, ERI1, GPI19, GPI12, GWT1, GPI14, PBN1, GPI18, MCD4, GPI10, SMP3, GPI13, GPI11, GPI7, GAA1, GPI8, GPI16, GPI17, GAB1, and BST1 proteins, respectively, such as e.g. those identified in the sequence listing under even numbers of SEQ ID Nos: 1 to 350, 389-394 and SEQ ID NOs: 395-400. Homologs are characterized by an identity of at least 60, 70, 80, 85, 90, 95 or 99% to known proteins. Moreover, homologs are characterized by a homology (similarity) of at least 40, 50, 60, 70, 80, 85, 90, 95 or 99% to known proteins. Homologous amino acids have identical or homologous amino acids. Homologous amino acid residues have similar chemical-physical properties, for example, amino acids belonging to a same group: aromatic (Phe, Trp, Tyr), acid (GIu, Asp), polar (GIn, Asn), basic (Lys, Arg, His), aliphatic (Ala, Leu, Ile, VaI), with a hydroxyl group (Ser, Thr), or with a short lateral chain (Gly, Ala, Ser, Thr, Met). It is expected that substitutions between such homologous amino acids do not change a protein phenotype (conservative substitutions). A series of algorithms is known in the art for determining homologous sequences. For example, the Smith-Waterman algorithm (Smith and Waterman, “Identification of common molecular subsequences.” Journal of molecular Biology 147.1 (1981): 195-197.) is generally known and used in the art if performing pairwise sequence comparisons and the skilled person knows how to apply it. Other algorithms which may be used are the algorithms of Needleman and Wunsch, 1970 (“A general method applicable to the search for similarities in the amino acid sequence of two proteins.” Journal of molecular biology 48.3 (1970): 443-453.), the similarity method of Pearson and Lipman, 1988 (“Improved tools for biological sequence comparison.” Proceedings of the National Academy of Sciences 85.8 (1988): 2444-2448.), or the algorithm of Karlin and Altschul, 1990 (“Methods for assessing the statistical significance of molecular sequence features by using general scoring schemes.” Proceedings of the National Academy of Sciences 87.6 (1990): 2264-2268.), modified by Karlin and Altschul, 1993 (“Applications and statistics for multiple high-scoring segments in molecular sequences.” Proceedings of the National Academy of Sciences 90.12 (1993): 5873-5877.), or computerized implementations of these algorithms (GAP, BESTFIT, BLAST, PASTA, and TFASTA in the Wisconsin Genetics Software Package, Genetics Computer Group (GCG), 575 Science Dr., Madison, Wis.). Typically, the default values of 5.00 for gap weight and 0.30 for gap weight length are used.

[0053] Alternatively, fungal genes are comprised by the present invention as target genes if they hybridize under stringent conditions to fungal GPI1, GPI2, GPI3, GPI15, ERI1, GPI19, GPI12, GWT1, GPI14, PBN1, GPI18, MCD4, GPI10, SMP3, GPI13, GPI11, GPI7, GAA1, GPI8, GPI16, GPI17, GAB1, and BST1 genes, respectively, such as those identified by SEQ ID NOs: 1 to 400.

[0054] Alternatively, fungal genes are comprised by the present invention as target genes if they encode proteins having the same activity as the GPI1, GPI2, GPI3, GPI15, ERI1, GPI19, GPI12, GWT1, GPI14, PBN1, GPI18, MCD4, GPI10, SMP3, GPI13, GPI11, GPI7, GAA1, GPI8, GPI16, GPI17, GAB1, and BST1 proteins, respectively, such as those identified by SEQ ID NOs: 1 to 400.

[0055] Alternatively, identification of GPI1, GPI2, GPI3, GPI15, ERI1, GPI19, GPI12, GWT1, GPI14, PBN1, GPI18, MCD4, GPI10, SMP3, GPI13, GPI11, GPI7, GAA1, GPI8, GPI16, GPI17, GAB1, and BST1 genes and/or proteins may occur via a consensus sequence. Alignment of known GPI1, GPI2, GPI3, GPI15, ERI1, GPI19, GPI12, GWT1, GPI14, PBN1, GPI18, MCD4, GPI10, SMP3, GPI13, GPI11, GPI7, GAA1, GPI8, GPI16, GPI17, GAB1, and BST1 genes or protein sequences may reveal conserved regions. Based on conserved regions, consensus sequences on the nucleic acid and/or amino acid level can be designed which may be used to identify additional GPI1, GPI2, GPI3, GPI15, ERI1, GPI19, GPI12, GWT1, GPI14, PBN1, GPI18, MCD4, GPI10, SMP3, GPI13, GPI11, GPI7, GAA1, GPI8, GPI16, GPI17, GAB1, and BST1 genes, respectively, in other fungi. Accordingly, GPI1, GPI2, GPI3, GPI15, ERI1, GPI19, GPI12, GWT1, GPI14, PBN1, GPI18, MCD4, GPI10, SMP3, GPI13, GPI11, GPI7, GAA1, GPI8, GPI16, GPI17, GAB1, and BST1 genes and proteins which are comprised by the present invention as target genes and proteins, respectively, are those which comprise consensus sequences identified as indicated above.

[0056] The term “and/or” within the terms “GPI1, GPI2, GPI3, GPI15, ERI1, GPI19, GPI12, GWT1, GPI14, PBN1, GPI18, MCD4, GPI10, SMP3, GPI13, GPI11, GPI7, GAA1, GPI8, GPI16, GPI17, GAB1, and/or BST1” and “GPI12, GAA1, GPI8 and/or GWT1” means that either one of the indicated genes or any combination of at least 2, 3, 4, 5, etc. to all genes is or are inhibited in the fungus.

[0057] The term “a protein involved in the GPI anchor biosynthesis pathway in a fungus” or “a protein involved in the GPI anchor biosynthesis pathway”, as referred to herein, comprises any protein which is encoded by a gene involved in the GPI anchor biosynthesis pathway. Moreover, the term “an RNA involved in the GPI anchor biosynthesis pathway in a fungus” or “a RNA involved in the GPI anchor biosynthesis pathway”, as referred to herein, comprises any RNA which is expressed from the gene involved in the GPI anchor biosynthesis pathway. Also, the term “a mRNA involved in the GPI anchor biosynthesis pathway in a fungus” or “a mRNA involved in the GPI anchor biosynthesis pathway”, as referred to herein, comprises any mRNA which is expressed from the gene involved in the GPI anchor biosynthesis pathway.

[0058] A preferred gene of the present invention is the GPI12, GAA1, GPI8 or GWT1 gene. In analogy, a preferred RNA, mRNA or protein involved in the GPI anchor biosynthesis pathway is the GPI12, GAA1, GPI8 or GWT1 RNA, mRNA or protein, respectively. In the exemplary part of the specification, a series of GPI12, GAA1, GPI8 and GWT1 genes and proteins of various fungi are listed and characterized by their accession numbers. The sequences are comprised in the sequence listing under SEQ ID NOs: 1 to 350 and 389-400. In addition to those genes and proteins, any genes and proteins are comprised by the present invention which fall under the definitions, as presented above.

[0059] The present invention comprises proteins as fungal target proteins which have the same activity as the GPI12, GAA1, GPI8 and GWT1 proteins identified in the sequence listing as SEQ ID NOs: 1 to 350 and 389 to 400 and/or as indicated directly below. Thereby, GPI12 encodes an N-acetylglucosaminylphosphatidylinositol deacetylase which removes the acetyl group of the N-acetyl glucosaminyl residue previously attached to the inositol residue in the second step of the GPI anchor biosynthesis pathway. GAA1 is part of the GPI transamidase complex, which catalyses the attachment of GPI to a protein in the eleventh step of the GPI biosynthesis pathway. GAA1 seems to be a metallo-peptide-synthetase catalyzing formation of the peptide bond between the substrate protein's w-site and the GPI lipid anchor's phosphoethanolamine. GPI8 is another part of the GPI transamidase complex. It seems to be a cystein protease cleaving the C-terminal pro-peptide of the substrate protein, even in the absence of the GPI anchor (Maxwell, 1995). GAA1 and GPI8 genes encode two indispensable sub-units of the GPI transamidase complex catalyzing the final GPI anchor transfer to proteins. These genes are single-copy genes in C. graminicola. The derived proteins share significant similarity with the corresponding proteins of other filamentous ascomycota, with high homology across proteins of different Colletotrichum species (FIG. 2). As expected, sequences of yeasts and of basidiomycota (FIG. 2) are not as closely related to C. graminicola GPI12, GAA1 and GPI8. For example, the amino acid identity of C. graminicola GPI12, GAA1 and GPI8 with the corresponding C. higginsianum proteins is 82, 92, and 94%, respectively. The identity with the Magnaporthe oryzae proteins is 61, 65, and 81%, the identity with the S. cerevisiae proteins is 30, 31, and 54%, respectively.

[0060] Identification of GPI12, GWT1, GAA1, GPI8 genes of other fungal pathogens:

[0061] In order to identify conserved amino acid sequences which can be used to identify further GPI12 genes of, e.g. ascomycota and basidiomycota, the GPI12 sequences of several fungal pathogens (Blumeria graminis f. sp. hordei, Blumeria graminis f. sp. tritici, Bipolaris maydis, Bipolaris victoriae, Bipolaris zeicola, Pyrenophora tritici-repentis, Pyrenophora teres f. teres, Leptosphaeria maculans, Mycosphaerella graminicola, Puccinia graminis tritici, Puccinia striiformis, Puccinia triticina, Ustilago hordei, Ustilago maydis, Sclerotinia sclerotiorum, Gaeumannomyces graminis var. tritici, Magnaporthe oryzae, Colletotrichum gloeosporioides, Colletotrichum graminicola, Colletotrichum higginsianum, Fusarium fujikuroi, Fusarium oxysporum, Fusarium graminearum, Claviceps purpurea, Verticillium dahliae) were compared as shown in FIG. 15). The amino acid sequences AHPDDEAMFF (SEQ ID NO: 401) and ILCLSSGDADGLG (SEQ ID NO: 402) are highly conserved and suitable to identify further GPI12 proteins of, e.g. ascomycota and basidiomycota. Alternatively, the amino acid sequences AHPDDEXXFF (SEQ ID NO: 411) and LSXGXXXGLG (SEQ ID NO: 412), wherein X is any naturally occurring amino acid, are highly conserved and are suitable consensus sequences to identify further GPI12 proteins of, e.g. ascomycota and basidiomycota. Preferably, X at position 7 of SEQ ID NO: 411 is A (Alanine), C (Cysteine) or S (Serine) and X at position 8 of SEQ ID NO: 411 is M (Methionine) or L (Leucine). Preferably, X at position 3 of SEQ ID NO: 412 is S (Serine) or T (Threonine), X at position 5 of SEQ ID NO: 412 is D (Aspartic Acid) or N (Asparagine), X at position 6 of SEQ ID NO: 412 is A (Alanine) or S and X at position 7 of SEQ ID NO: 412 is D, T, A or E (Glutamic Acid).

[0062] In order to identify conserved amino acid sequences which can be used to identify further GWT1 genes of, e.g. ascomycota and basidiomycota, the GWT1 sequences of several fungal pathogens (Alternaria solani, Pyrenophora teres f. teres, Pyrenophora tritici-repentis, Blumeria graminis f. sp. tritici, Botrytis cinerea, Sclerotinia sclerotiorum, Colletotrichum fioriniae, Colletotrichum graminicola, Colletotrichum higginsianum, Fusarium graminearum, Fusarium pseudograminearum, Fusarium oxysporum, Fusarium verticillioides, Fusarium solani, Magnaporthe oryzae, Cercospora beticola, Sphaerulina musiva, Mycosphaerella fijiensis, Septoria tritici, Zymoseptoria brevis, Mycosphaerella pini, Melampsora populina, Puccinia graminis tritici, Leptosphaeria maculans, Septoria nodorum, Setosphaeria turcica, Bipolaris maydis, Bipolaris oryzae, Bipolaris sorokiniana, Bipolaris victoriae, Bipolaris zeicola) were compared as shown in FIG. 16). The amino acid sequences GTSLMDXGVGSFV (SEQ ID NO: 403) and HVXEYGVHWNFFFTL (SEQ ID NO: 404) are highly conserved and suitable to identify further GWT1 proteins of, e.g. ascomycota and basidiomycota. Alternatively, the amino acid sequences GXSLMDXGVGSFV (SEQ ID NO: 413) and HVXEYGXHWNFFFTL (SEQ ID NO: 414) are highly conserved and are suitable consensus sequences to identify further GPI12 proteins of, e.g. ascomycota and basidiomycota. X is any naturally occurring amino acid. Preferably, X at position 2 of SEQ ID NO: 413 is T (Threonine), V (Valine) or I (Isoleucine), X at position 7 of SEQ ID NO: 403 or SEQ ID NO: 413 is M (Methionine), S (Serine), L (Leucine), I or V. Preferably, X at position 3 of SEQ ID NO: 404 or SEQ ID NO: 414 is T (Threonine) or S (Serine), and X at position 7 of SEQ ID NO: 414 is V (Valine) or I (Isoleucine).

[0063] In order to identify conserved amino acid sequences which can be used to identify further GAA1 genes of, e.g. ascomycota, several GAA1 sequences of ascomycota (Cercospora beticola, Mycosphaerella graminicola, Bipolaris oryzae, Bipolaris zeicola, Leptosphaeria maculans, Botrytis cinerea, Blumeria graminis f. sp. hordei, Blumeria graminis f. sp. tritici, Colletotrichum gloeosporioides, Colletotrichum graminicola, Colletotrichum orbiculare, Verticillium alfalfa, Verticillium dahliae, Fusarium fujikuroi, Fusarium oxysporum, Fusarium graminearum, Fusarium solani, Gaeumannomyces graminis var. tritici, Magnaporthe oryzae) were compared as shown in FIG. 17). The amino acid sequences TYISENALLPGQVHTYFGGS (SEQ ID NO: 405), RYFKRWSLWSKDI (SEQ ID NO: 406) and NNLLEHLHQSFFFY (SEQ ID NO: 407) are highly conserved and suitable to identify further GAA1 proteins of, e.g. ascomycota. Alternatively, the amino acid sequences TYXSENAXLPGQVHTYFXGS (SEQ ID NO: 415), RYFXRWSXWSKDI (SEQ ID NO: 416) and NNLLEHXHQSFFFY (SEQ ID NO: 417) are highly conserved and suitable to identify further GAA1 proteins of, e.g. ascomycota. X is any naturally occurring amino acid. Preferably, X at position 3 of SEQ ID NO: 415 is I (Isoleucine) or V (Valine), X at position 8 of SEQ ID NO: 415 is L (Leucine) or I, and X at position 18 of SEQ ID NO: 415 is A (Alanine), G (Glycine) or T (Threonine). Preferably, X at position 4 of SEQ ID NO: 416 is K (Lysine), R (Arginine) or N (Asparagine), and X at position 8 of SEQ ID NO: 416 is L (Leucine) or I (Isoleucine). Preferably, X at position 7 of SEQ ID NO: 417 is L (Leucine) or F (Phenylalanine).

[0064] In order to identify conserved amino acid sequences which can be used to identify further GPI8 genes of, e.g. ascomycota and basidiomycota, the GPI8 sequences of several fungal pathogens (Blumeria graminis f. sp. tritici, Botrytis cinerea, Bipolaris maydis, Bipolaris sorokiniana, Pyrenophora teres f. teres, Pyrenophora tritici-repentis, Leptosphaeria maculans, Puccinia graminis, Ustilago hordei, Ustilago maydis, Fusarium graminearum, Fusarium oxysporum, Colletotrichum gloeosporioides, Colletotrichum graminicola, Colletotrichum higginsianum, Gaeumannomyces graminis var. tritici, Magnaporthe oryzae, Verticillium dahliae) were compared as shown in FIG. 18). The amino acid sequences NWAVLVCTSRFWFNYRH (SEQ ID NO: 408), VKRLGIPDSQIILMLPDDMACNPRNAFPG (SEQ ID NO: 409) and YMTGHGGNEFLKFQDAEEI (SEQ ID NO: 410) are highly conserved and suitable to identify further GPI8 proteins of, e.g. ascomycota and basidiomycota. The amino acid sequences NWAVLVXTSXFWFNYRH (SEQ ID NO: 418), VKRLGIPDSXIILMLXDDXACNPRNXFPG (SEQ ID NO: 419) and YMTGHGGXEFLKFQDXEEI (SEQ ID NO: 420) are highly conserved and suitable to identify further GPI8 proteins of, e.g. ascomycota and basidiomycota. X is any naturally occurring amino acid. Preferably, X at position 7 of SEQ ID NO: 418 is C (Cysteine), S (Serine) or G (Glycine), and X at position 10 of SEQ ID NO: 418 is R (Arginine) or K (Lysine). Preferably, X at position 10 of SEQ ID NO: 419 is Q (Glutamine) or N (Asparagine), X at position 16 of SEQ ID NO: 419 is P (Proline) or A (Alanine), X at position 19 of SEQ ID NO: 419 is M (Methionine) or A, and X at position 26 of SEQ ID NO: 419 is A, K (Lysine) or M. Preferably, X at position 8 of SEQ ID NO: 420 is N (Asparagine) or D (Aspartic acid), and X at position 16 of SEQ ID NO: 420 is A (Alanine) or Y (Tyrosine).

[0065] As used herein, “part” of the gene involved in the GPI anchor biosynthesis pathway is meant any part of the gene to which an aRNA or an RNA molecule in antisense direction hybridizes and inhibits expression thereof. According to the above, the “part” of the gene may be at least 15, 16, 17, 18, 19 or 20 contiguous nucleotides, preferably at least 21, 22, 23, 24, 25, 30, 40, 50, 60, 70, 80, 90 or 100 contiguous nucleotides, and more preferably at least 150, 200, 250, 300, 350, 450, 500, 600, 700, 800, 900 or 1000 contiguous nucleotides in length, but is below the length of gene involved in the GPI anchor biosynthesis pathway. Still more preferably, the length is 100-1700, such as 200-1000, or 300-700 contiguous nucleotides, and most preferably 493 contiguous nucleotides for the GPI12 gene, 560 contiguous nucleotides for the GAA1 gene, or 690 contiguous nucleotides for the GPI8 gene. The “part” of the gene may be in any region of the gene involved in the GPI anchor biosynthesis pathway, so that upon hybridizing of the aRNA or RNA molecule in antisense direction, the transcription of the gene or the translation of the mRNA is inhibited. The “part” may be in a regulatory region such as the promoter region or terminator regulatory sequence, in exon sequences, in intron sequences or along the whole mRNA, as long as the transcription of the gene or the translation of the mRNA is inhibited. The “part” may be one or more than one parts. The “more than one part” may be located on the same gene or on different genes.

[0066] As used herein, a “fungus” is any fungus which comprises a GPI anchor biosynthesis pathway. Preferably, the fungus comprises (a) GPI1, GPI2, GPI3, GPI15, ERI1, GPI19, GPI12, GWT1, GPI14, PBN1, GPI18, MCD4, GPI10, SMP3, GPI13, GPI11, GPI7, GAA1, GPI8, GPI16, GPI17, GAB1, and/or BST1 gene(s), more preferably the fungus comprises (a) GPI12, GAA1, GPI8 and/or GWT1 gene(s). Still more preferably, the fungus is selected from the group consisting of ascomycota, basidiomycota, zygomycota, chytridiomycota, blastocladiomycota, neocallimastigomycota, and glomeromycota. Still more preferably, the fungus is a phyto-pathogenic fungus. Still more preferably, the fungus is selected from the genus Alternaria; Aphanomyces; Ashbya; Aspergillus; Beauveria; Bipolaris; Blumeria; Botryotinia; Botrytis; Cercospora; Chaetomium; Colletotrichum; Cladosporium; Claviceps; Coccidioides; Cordyceps; Cryptococcus; Diplocarpon; Diplodia; Drechslera; Endocarpon; Erysiphe; Exophiala; Exserophilum; Fusarium; Gaeumannomyces; Geotrichum; Lachancea; Leptosphaeria; Macrophomina; Magnaporthe; Marssonina; Metarhizium; Microsphaera; Monographella; Myceliophthora; Neurospora; Paracoccidioides; Phaeosphaeria; Phakospora; Puccinia; Pyrenophora; Pyricularia; Ramularia; Rhizoctonia; Saccharomyces; Sclerotium; Trichoderma; Sclerotinia; Ustilago; Verticillium; Zygosaccharomyces; Zymoseptoria; Mycosphaerella; Penicillium; Podospora; Paracoccidioides; Pseudopeziza; Phaeosphaeria; Sclerotinia; Sordaria; Schizsaccharomyces, Zygosaccharomyces; Talaromyces; Thielavia; Venturia, and Pseudocercospora; and still more preferably the fungus is selected from Alternaria solani; Aspergillus flavus; Alternaria alternata; Aphanomyces cochlioides; Ashbya gossypii; Beauveria bassiana; Bipolaris maydis; Bipolaris sorokiniana; Botryotinia fuckeliana; Botrytis cinerea; Cercospora beticola, Cercospora kikuchii; Cercospora sojina; Cercospora zea maydis; Colletotrichum graminicola; Colletotrichum gloeosporioides; Colletotrichum orbiculare; Claviceps purpurea; Cordyceps militaris; Diplodia maydis; Drechslera glycines; Drechsiera oryzae; Erysiphe betae; Exserohilum turcicum; Fusarium fujikuroi; Fusarium graminearum; Fusarium moniliforme; Fusarium oxysporum; Fusarium solani; Gaeumannomyces graminis; Leptosphaeria maculans; Magnaporthe oryzae; Microsphaera diffusa; Metarhizium acridum; Metarhizium anisopliae, Penicillium spp.; Pyrenophora teres; Pyrenophora tritici-repentis; Puccinia graminis; Trichoderma vireos; Sclerotinia sclerotiorum; Ustilago maydis; Ustilago hordei; Verticillium alfalfa; Verticillium dahlia; Zygosaccharomyces bailii; Zygosaccharomyces rouxii; Blumeria graminis; Chaetomium globosum; Colletotrichum higginsianum; Colletotrichum orbiculare; Coccidioides posadasi; Endocarpon pusillum; Exophiala dermatitidis; Lachancea thermotoleran; Marssonina brunnea; Myceliophthora thermophile; Metarhizium acridum; Macrophomina phaseolina; Monographella albescens; Paracoccidioides brasiliensis; Phaeoshaeria maydis; Phakopsora pachyrhizi; Pyrenophora tritici-repentis; Phaeosphaeria nodorum; Puccinia graminis; Puccinia polysora; Puccinia striiformis; Puccinia triticina; Pyricularia oryzae; Ramularia beticola, Rhizoctonia oryzae; Rhizoctonia solani; Sclerotium rolfsii; Saccharomyces arboricola; Sordaria macrospora; Schizsacchaormyces japonicus, Zygosaccharomyces rouxii; Talaromyces marneffei; Talaromyces stipitatus; Thielavia terrestris; Venturia inaequalis; Verticillium albo-atrum; Verticillium dahlia; Zymoseptoria tritici; and Pseudocercospora fijiensis. The fungus may also be selected from the genus Candida such as Candida albicans; Candida glabrata; Candida orthopsilosis; Candida parapsilosis; or Candida tropicalis. The fungal genes of the present invention may serve in the finding of not yet identified gene(s) of phyto-pathogenic fungi, e.g. via consensus sequences.

[0067] Also included within the term “fungus” are fungus-like eukaryotic microorganisms such as the oomycota or oomycetes which include notorious pathogens of plants, causing devastating diseases such as late blight of potato and sudden oak death. Examples of oomycetes which are included by the present invention are Phytophthora infestans, Phytophthora palmivora, Phytophthora sojae.

[0068] Oomycetes are included within the present invention and are, for the purposes of the present invention, included within the term “fungal” or “fungus”.

[0069] As used herein, the term “phyto-pathogenic” or “pathogenic” refers to a fungus which causes a disease in a plant.

[0070] The methods as comprised by the present invention which are used to inhibit the expression of a gene involved in the GPI anchor biosynthesis pathway in a fungus are known to the skilled person under the term “gene silencing”. “Gene silencing” is a general term used to describe the regulation of gene expression. In particular, this term refers to the ability of a cell to prevent the expression of a gene in the cell. Gene silencing can occur during either transcription or translation of a gene. The application of gene silencing methods in plants is well known in the art. Reference is made to Plant Gene Silencing—Methods and Protocols, Mysore K. S and Senthil-Kumar M. (eds.), Springer Protocols, Humana Press, 2015, which provides the reader with a comprehensive review of various gene silencing methodologies and its applications. The skilled person may apply any methods described in this document or elsewhere which are suitable to achieve gene silencing in a plant or in a fungus.

[0071] Generally used gene silencing methodologies in plants include host-induced gene silencing (HIGS) which is a method where a plant controls pathogens by RNA interference (RNAi) and exhibits an enhanced resistance when carrying suitable gene silencing constructs. RNA interference is a natural process used by cells in many eukaryotes to regulate gene expression. RNA interference is a vital part of the immune response to viruses and other foreign genetic material, especially in plants. For inducing RNAi in a cell or organism, dsRNA with a sequence substantially complementary to a gene of interest is synthesized either within a cell or organism or it is synthesized outside the cell or organism and introduced into the cell or organism, where it is recognized as exogenous genetic material and activates the RNAi pathway. The double-stranded molecule is cut into small double-stranded fragments by an enzyme called Dicer. These small fragments, which include small interfering RNAs (siRNA) and microRNA (miRNA), are often 19-40 nucleotides in length. The fragments integrate into a multi-subunit protein called the RNAi induced silencing complex (RISC). One strand of the molecule, the guide strand or antisense strand, binds to RISC, while the other strand, the passenger strand or sense strand, is degraded. The guide strand pairs with a complementary sequence in an mRNA molecule and induces cleavage by Argonaute, the catalytic component of the RISC complex, thereby preventing it from being used as a translation template.

[0072] Other gene silencing methodologies in plants use antisense oligonucleotides which are short nucleic acid fragments that bind to substantially complementary target mRNA molecules. These molecules are single-stranded RNA molecules generally 15 to 25 nucleotides long.

[0073] The preferred method used in the present invention is the HIGS method. Moreover, any other gene silencing method known in the art may be used for inhibiting the expression of a gene in a fungus while being in contact with a plant.

[0074] For the production of fungus resistant plants in the present invention, a DNA capable of expressing an inhibitory nucleic acid molecule capable of inhibiting the expression of a gene involved in the GPI anchor biosynthesis pathway in a fungus is selected and introduced into the plant or a part thereof.

[0075] As used herein, “a DNA capable of expressing an inhibitory nucleic acid molecule” is any DNA molecule which results in an inhibitory nucleic acid molecule. Preferably, the DNA comprises an antisense sequence which is substantially complementary to contiguous stretches of the fungal gene involved in the GPI anchor biosynthesis pathway or part thereof. Upon transcription of the DNA, an inhibitory molecule, preferably an RNA molecule, is produced which comprises the antisense sequence which is capable of hybridizing to the fungal gene involved in the GPI anchor biosynthesis pathway or part thereof. The RNA molecule may be an mRNA molecule, a single-stranded antisense RNA, or a dsRNA, for example an hpRNA, siRNA or miRNA. The DNA may comprise one or more than one antisense sequence(s). Thus, the DNA may comprise one or more than one antisense sequence(s) against one of the fungal genes involved in the GPI anchor biosynthesis pathway or more than one antisense sequence(s) against more than one of the fungal genes involved in the GPI anchor biosynthesis pathway. Preferably, the DNA comprises one or more than one antisense sequence(s) against the GPI1, GPI2, GPI3, GPI15, ERI1, GPI19, GPI12, GWT1, GPI14, PBN1, GPI18, MCD4, GPI10, SMP3, GPI13, GPI11, GPI7, GAA1, GPI8, GPI16, GPI17, GAB1, or BST1 gene, more preferably against the GPI12, GAA1, GPI8 or GWT1 gene, or alternatively more than one antisense sequence against any of a combination of at least two of the GPI1, GPI2, GPI3, GPI15, ERI1, GPI19, GPI12, GWT1, GPI14, PBN1, GPI18, MCD4, GPI10, SMP3, GPI13, GPI11, GPI7, GAA1, GPI8, GPI16, GPI17, GAB1, and BST1 genes, more preferably against the GPI12, GAA1, GPI8 and GWT1 genes. The DNA may comprise in a still more preferred embodiment one or more than one sense sequence(s) which is (are) substantially complementary to the antisense sequence(s). Within this latter embodiment, the DNA preferably comprises one or more than one sense sequence(s) against the GPI1, GPI2, GPI3, GPI15, ERI1, GPI19, GPI12, GWT1, GPI14, PBN1, GPI18, MCD4, GPI10, SMP3, GPI13, GPI11, GPI7, GAA1, GPI8, GPI16, GPI17, GAB1, or BST1 gene, more preferably against the GPI12, GAA1, GPI8 or GWT1 gene, or alternatively more than one sense sequence against any of a combination of at least two of the GPI1, GPI2, GPI3, GPI15, ERI1, GPI19, GPI12, GWT1, GPI14, PBN1, GPI18, MCD4, GPI10, SMP3, GPI13, GPI11, GPI7, GAA1, GPI8, GPI16, GPI17, GAB1, and BST1 gene, more preferably against the GPI12, GAA1, GPI8 and GWT1 genes. The antisense and sense sequences may be present on the same or on different DNA strands. Upon transcription, inhibitory molecule(s) comprising the antisense and possibly sense sequences are generated. The DNA may be double-stranded or single-stranded and is preferably double-stranded.

[0076] The DNA capable of expressing an inhibitory nucleic acid molecule may be present within an expression cassette. As used herein, an “expression cassette” is a nucleic acid molecule which is composed of one or more genes or genetic sequences and the sequences controlling their expression. An expression cassette may contain a promoter regulatory sequence, also designated promoter, operably linked to an open reading frame or another genetic sequence, and a 3′ untranslated region that may contain a polyadenylation site. The promoter directs the machinery of the cell to make RNA and/or protein. As used herein, “operably linked” means that expression of the linked DNA sequences occurs in the plant. An expression cassette may be part of a vector used for cloning and introducing the DNA into a cell.

[0077] As used herein, an “antisense sequence” is a sequence which is substantially complementary to any contiguous stretch of (a) fungal mRNA(s) involved in the GPI anchor biosynthesis pathway or part(s) thereof. The antisense sequence is selected such that it hybridizes to a contiguous sequence element of the mRNA(s) involved in the GPI anchor biosynthesis pathway and inhibits the translation thereof. The antisense sequence has a length which allows inhibition of translation of the mRNA(s) involved in the GPI anchor biosynthesis pathway in the fungus. The antisense sequence as comprised by an antisense RNA (aRNA) which inhibits the mRNA(s) involved in the GPI anchor biosynthesis pathway via the antisense mechanism has a length of at least 15 nucleotides and may extend to hundreds of nucleotides or over the whole length of the mRNA(s) involved in the GPI anchor biosynthesis pathway. The preferred length of the antisense sequence as comprised by an aRNA is 15 to 300, 15 to 200, 15 to 100 or 15 to 50 nucleotides and most preferably 15 to 25 nucleotides. The antisense sequence as comprised by dsRNA which induces the RNAi machinery has a length of at least 19 nucleotides and may extend to hundreds of nucleotides or over the whole length of the mRNA(s) involved in the GPI anchor biosynthesis pathway. The preferred length of the antisense sequence as comprised by dsRNA is 19 to 300, 19 to 200, 19 to 100 or 19 to 50 nucleotides and most preferably 19 to 25 nucleotides. The antisense sequence may be directed against the coding part or the regulatory part of the fungal mRNA(s) involved in the GPI anchor biosynthesis pathway.

[0078] The selection of a suitable antisense sequence can be performed by methods known in the art. For RNAi constructs, RNAi programs like Emboss siRNA prediction (http://emboss.sourceforge.net/apps/release/6.6/emboss/apps/sirna.html) are available which identify suitable sequence elements of the genes involved in the GPI anchor biosynthesis pathway As used herein, a “sense sequence” is a sequence which is substantially complementary to an antisense sequence. Due to the substantial complementarity of the sequences, the antisense and sense sequences hybridize with each other.

[0079] The term “complementary” includes “complementary” as well as “reverse complementary”. “Reverse complementary” means that the nucleotides of a reverse complementary sequence are, as regards their 5′ to 3′ extension, complementary and ordered in a mirrored fashion with respect to a polynucleotide sequence. Thus, independent of whether antisense and sense sequences are on the same strand or on different strands (DNA or RNA), they need to be reverse complementary allowing them to form a double-strand either by intramolecular hybridization or inter-molecular hybridization, respectively.

[0080] The term “capable of expressing” means that the DNA is the starting substance which is transferred within the plant cell into a nucleic acid molecule which is capable of inhibiting the expression of a gene involved in the GPI anchor biosynthesis pathway in a fungus. Preferably, this term comprises the transcription of the DNA into an RNA molecule, which can hybridize to a gene involved in the GPI anchor biosynthesis pathway in a fungus and inhibit the expression thereof.

[0081] As used herein, “an inhibitory nucleic acid molecule” or “an inhibitory nucleic acid molecule capable of inhibiting the expression of a gene involved in the GPI anchor biosynthesis pathway” is any nucleic acid molecule which inhibits the transcription and/or translation of a gene involved in the GPI anchor biosynthesis pathway in a fungus. Inhibition may occur in the coding part of the gene involved in the GPI anchor biosynthesis pathway in the fungus or the regulatory part located in the regions 5′ and/or 3′ to the gene. Preferably, the inhibition is by hybridizing to the gene involved in the GPI anchor biosynthesis pathway in the fungus due to substantial complementarity, so that the DNA involved in the GPI anchor biosynthesis pathway and/or (m)RNA involved in the GPI anchor biosynthesis pathway cannot be transcribed and/or translated, respectively. Inhibition may also be achieved by degrading the hybridized gene involved in the GPI anchor biosynthesis pathway. Preferably, the inhibitory nucleic acid molecule is an RNA molecule which is transcribed from the DNA capable of expressing an inhibitory nucleic acid molecule. More preferably, the inhibitory nucleic acid molecule is a single-stranded antisense RNA (aRNA) which comprises an antisense sequence which is substantially complementary to the fungal gene involved in the GPI anchor biosynthesis pathway and which hybridizes thereto and inhibits the translation thereof. Alternatively, the inhibitory nucleic acid is an RNA molecule in sense direction and an RNA molecule in antisense direction. The RNA molecule in sense direction and the RNA molecule in antisense direction may be one RNA molecule or may be different RNA molecules. Due to their inverse substantial complementarity, the sense and antisense sequences hybridize with each other and form dsRNA. The dsRNA such as siRNA or miRNA may be composed of two separate strands or may be one strand such as hpRNA. In a further alternative, the inhibitory nucleic acid molecule is a dsRNA, namely siRNA or miRNA, which forms within the plant during the RNAi procedure, whereby dsRNA transcribed from the DNA induces the RNAi mechanism and is processed to the siRNA or miRNA. Alternatively, the inhibitory molecule may be a catalytic RNA or ribozyme. In a further alternative, the inhibitory nucleic acid molecule may be or encode a repressor molecule which functions by inhibiting the transcription and/or translation of the gene(s) involved in the GPI anchor biosynthesis pathway and/or RNA(s) involved in the GPI anchor biosynthesis pathway in the fungus. For example, the repressor molecule functions by inhibiting the access of proteins, which are necessary for transcription or translation, to the fungal gene(s) involved in the GPI anchor biosynthesis pathway and/or RNA(s) involved in the GPI anchor biosynthesis pathway.

[0082] As used herein, the term “capable of inhibiting the expression of a gene”, “capable of inhibiting the expression of a gene involved in the GPI anchor biosynthesis pathway”, “inhibiting the expression of a gene”, or “inhibiting the expression of a gene involved in the GPI anchor biosynthesis pathway” means that the inhibitory nucleic acid molecule (can) prevent(s) that the fungal gene involved in the GPI anchor biosynthesis pathway is processed further, such as transcribed or translated. Prevention may occur by any kind of inhibition such as hybridization to the gene, cleaving of the gene, repressing the transcription or translation of the gene or catalytic actions as performed by ribozymes. Preferably, the nucleic acid molecule can hybridize or hybridizes to the gene involved in the GPI anchor biosynthesis pathway and prevents the further processing thereof such as transcription of DNA or translation of mRNA. Prevention occurs either by blocking the gene involved in the GPI anchor biosynthesis pathway so that downstream actions cannot be performed or by degrading the gene involved in the GPI anchor biosynthesis pathway by host-specific enzymes. A reduction of expression of at least 40%, 50%, 60%, 70%, 80%, 90%, 95% or of 100% for a gene involved in the GPI anchor biosynthesis pathway, as compared to expression in a non-transgenic plant of identical phenotype, allows scoring the transgenic plant as being resistant or as having resistance against a fungus. Preferably, the damages on the plant are reduced by at least 50%, 60%, 70%, 80%, 90% or by 100% in a resistant transgenic plant according to the present invention as compared to a non-transgenic plant of identical phenotype. A reference plant may also be a plant of same species with natural resistance against a specific fungus, such as a plant which has the best fungal resistance in a specific area such as Germany, as compared to other plants of same species.

[0083] Each fungus has its characteristic picture of damages which it causes with a host plant. The damages are e.g. visible in the form of leaf spots or root rot (dry texture, concentric rings, discoloration and fruiting structures) or vascular wilt (gradual wilting of the above ground shoots).

[0084] Other signs are the presence of mycelium and fruiting bodies which range in size from microscopic to easily detectable with the eye. They are found within the leaf spot or stem rot area. The skilled person knows other forms of damages which are caused by fungi on plants. The extent of damages can e.g. be determined by determining the relative area of spots on the plant leaves.

[0085] As used herein, the term “a DNA”, “an inhibitory nucleic acid molecule” or “a gene” includes the singular and plural forms, particularly includes “one DNA”, “more than one DNA”, “one inhibitory nucleic acid molecule”, “more than one inhibitory nucleic acid molecule”, “one gene”, and “more than one gene”, such as 2, 3, 4, 5, etc. DNAs expressing 2, 3, 4, 5, etc. inhibitory nucleic acid molecules directed against 2, 3, 4, 5, etc. to all genes involved in the GPI anchor biosynthesis pathway.

[0086] The term “a gene” or “a gene involved in the GPI anchor biosynthesis pathway”, means either one gene or more than one gene involved in the GPI anchor biosynthesis pathway, such as 2, 3, 4, 5, etc. to all genes involved in the GPI anchor biosynthesis pathway. Consequently, “a DNA capable of expressing an inhibitory nucleic acid molecule” or “an inhibitory nucleic acid molecule” may comprise one or more DNA(s) capable of expressing one or more inhibitory nucleic acid molecule(s) against one gene involved in the GPI anchor biosynthesis pathway or more than one gene such as 2, 3, 4, 5, etc. to all genes involved in the GPI anchor biosynthesis pathway. Consequently, the plant of the present invention may comprise in a cell one DNA molecule expressing one or more inhibitory nucleic acid(s) against one gene involved in the GPI anchor biosynthesis pathway or against more than one gene involved in the GPI anchor biosynthesis pathway. Alternatively, the plant of the present invention may comprise in a cell more than one DNA expressing more than one inhibitory nucleic acid molecules, each DNA or each inhibitory nucleic acid molecule being against one or more than one specific gene(s) involved in the GPI anchor biosynthesis pathway. Also, combinations of DNA against one gene and DNA against more than one gene are comprised by the present invention. In analogy, also combinations of inhibitory nucleic acid molecule against one gene and inhibitory nucleic acid molecule against more than one gene are comprised by the present invention. Moreover, a DNA may express more than one inhibitory nucleic acid molecule against one fungal gene.

[0087] The term “expression of a gene” or “expression of a gene involved in the GPI anchor biosynthesis pathway” means (1) the transcription of a gene involved in the GPI anchor biosynthesis pathway into an RNA or mRNA involved in the GPI anchor biosynthesis pathway and/or (2) the translation of a RNA or mRNA involved in the GPI anchor biosynthesis pathway into a protein.

[0088] As used herein, an “antisense RNA” or “aRNA” is a single-stranded RNA which comprises an antisense sequence which is substantially complementary to (the) mRNA(s) involved in the GPI anchor biosynthesis pathway which is (are) transcribed in the fungus. The aRNA binds to mRNA(s) involved in the GPI anchor biosynthesis pathway produced by the fungus by base-pairing, thereby obstructing the translation machinery and inhibiting translation and further processing. Consequently, the production of protein(s) involved in the GPI anchor biosynthesis pathway is inhibited.

[0089] As used herein, an “RNA molecule in antisense direction” is an RNA molecule which comprises an antisense sequence.

[0090] As used herein, an “RNA molecule in sense direction” is an RNA molecule which comprises a sense sequence. An RNA molecule in antisense direction and an RNA molecule in sense direction may be one RNA molecule, i.e. the antisense and sense sequences are present on the same RNA molecule, or may be different RNA molecules, i.e. the antisense and sense sequences are present on different RNA molecules.

[0091] As used herein, a “double-stranded RNA” or “dsRNA” is an RNA molecule that is partially or completely double stranded. The dsRNA may be formed by an RNA molecule in antisense direction and an RNA molecule in sense direction. Double-stranded RNA may be formed by a single nucleic acid strand which comprises the sense and antisense sequences. In this case, the RNA molecule in sense direction and the RNA molecule in antisense are on the same RNA molecule. The resulting dsRNA has a hairpin or stem-loop structure, whereby the stem is formed by the sense and anti-sense sequences. The loop may be formed by a sequence which has no substantial complementarity within the strand and lies between the sense and antisense sequences.

[0092] Such a loop sequence can be an intron sequence of a gene, such as the intron of the RGA2 gene of wheat (Loutre et al., 2009, Two different CC-NBS-LRR genes are required for Lr10-mediated leaf rust resistance in tetraploid and hexaploid wheat, Plant Journal 60, 1043-1054) or the second intron of the Cut2 gene of Magnaporthe oryzae. Alternatively, the dsRNA may be formed by two different RNA strands, whereby the antisense sequence and the sense sequence are on different strands. In this case, the RNA molecule in antisense direction is different from the RNA molecule in sense direction.

[0093] The term “dsRNA” comprises dsRNA which is capable of activating the RNAi pathway in a plant cell. The term “dsRNA” also comprises small or short interfering RNA (siRNA) and micro-RNA (miRNA). The two latter dsRNAs are either expressed in a transgenic plant of the present invention from the DNA capable of expressing an inhibitory nucleic acid molecule or are produced by the RNAi machinery in the plant cell starting from a longer dsRNA expressed from the DNA. The term “dsRNA” also comprises circular interfering RNA (ciRNA), short hairpin RNA (shRNA) and the like. The term “dsRNA” also includes dsRNA, such as hpRNA, siRNA, miRNA or longer dsRNA, comprising antisense and sense sequences, which is not produced within a transgenic plant, but is produced by genetic engineering or synthesizing methods in the laboratory and which is for external application on a plant and/or fungus.

[0094] As used herein, “RNAi” or “RNA interference” refers to the process of sequence-specific gene silencing, mediated by double-stranded RNA (dsRNA). In order to function, one strand of the dsRNA comprises an antisense sequence which is substantially complementary to (the) mRNA(s) involved in the GPI anchor biosynthesis pathway or (a) part(s) thereof which is (are) transcribed in the fungus. The other strand comprises a sense sequence which is substantially complementary to the antisense sequence. The dsRNA is capable of activating the RNAi pathway in a plant cell resulting in the formation of a single stranded RNA comprising the antisense strand which binds to (the) mRNA(s) involved in the GPI anchor biosynthesis pathway in the fungus and results in the degradation of the mRNA.

[0095] According to the present invention, the sizes of the sense or antisense sequence or the sizes of the RNA molecule in sense direction or the RNA molecule in antisense direction may be the same. Alternatively, the sizes may differ.

[0096] The DNA capable of expressing an inhibitory nucleic acid molecule results in one embodiment of the present invention, upon expression in the plant cell in an mRNA molecule which may function as an aRNA and inhibit mRNA(s) involved in the GPI anchor biosynthesis pathway in the fungus. Such DNA molecule comprises on the sense strand an antisense sequence.

[0097] In another embodiment, the DNA which is capable of expressing an inhibitory nucleic acid molecule results upon expression in the plant cell in an mRNA molecule or in mRNA molecules which may form a dsRNA which may activate the RNAi machinery. Within this embodiment, the DNA encodes an RNA molecule in sense direction and an RNA molecule in antisense direction. The sense sequence and the antisense sequence may be present on one DNA strand. This may result in an mRNA molecule which comprises the sense sequence and antisense sequence on the same mRNA molecule. Due to the reverse substantial complementarity of the sense sequence and antisense sequence, a hairpin dsRNA will form. Alternatively, if e.g. the sense and antisense sequences being present on the same DNA strand are under the control of different promoters or of one bidirectional promoter, different mRNA molecules are transcribed, one harboring the sense sequence and the other harboring the antisense sequence. Different mRNA molecules, one harboring the sense sequence and the other harboring the antisense sequence, may also form if the sense sequence and the antisense sequence are present on different strands of the DNA. Due to the rovers substantial complementarity of the sense and antisense sequences, the mRNAs form a dsRNA. The dsRNA may be recognized as foreign by the plant cell and may activate the RNAi machinery. The dsRNA transcribed from the DNA may be an siRNA or miRNA molecule or may be processed to an siRNA or miRNA molecule. After infection of the plant with a fungus, an exchange of the RNA generated in the plant may occur between the plant and the fungus. The RNA incorporated in the fungus may lead to a sequence-specific gene silencing of a gene involved in the GPI anchor biosynthesis pathway. It is known that the siRNA effect can be continued in plants if the RNA dependent RNA polymerase synthesizes new siRNAs from the degraded mRNA fragments. These secondary or transitive RNAis can enhance the silencing.

[0098] As used herein, the term “DNA”, “DNA molecule” or DNA polynucleotide” etc. refers to double-stranded DNA, unless otherwise specified.

[0099] As used herein, “substantially complementary” refers to polynucleotide strands that are capable of base pairing according to the standard Watson-Crick complementarity rules. It is understood that two polynucleotides hybridize to each other even if they are not completely complementary to each other. Consequently, the term “substantially complementary” means that two polynucleotide sequences are complementary over at least 80% of their nucleotides, preferably over at least 85%, 90%, 95%, 96%, 97%, 98%, 99%. Most preferably, the two polynucleotide sequences are complementary over 100% of their nucleotides. Alternatively, “substantially complementary” means that two polynucleotide sequences can hybridize under high stringency conditions. It is understood that an antisense sequence which is substantially complementary to (a) fungal gene(s) involved in the GPI anchor biosynthesis pathway or transcript(s) involved in the GPI anchor biosynthesis pathway has a low degree of complementarity to functionally identical or similar genes in plants, preferably below 60%, and does not hybridize or only to a low degree to endogenous plant genes or transcripts, so that the transcription and/or translation of plant genes is not reduced or reduced to at most 10%, as compared to a non-transgenic plant of identical phenotype.

[0100] As used herein, the term “hybridize(s)(ing)” refers to the formation of a hybrid between two nucleic acid molecules via base-pairing of complementary nucleotides. The term “hybridize(s)(ing) under stringent conditions” means hybridization under specific conditions. An example of such conditions includes conditions under which a substantially complementary strand, namely a strand composed of a nucleotide sequence having at least 80% complementarity, hybridizes to a given strand, while a less complementary strand does not hybridize. Alternatively, such conditions refer to specific hybridizing conditions of sodium salt concentration, temperature and washing conditions. As an example, highly stringent conditions comprise incubation at 42° C., 50% formamide, 5×SSC (150 mM NaCl, 15 mM trisodium citrate), 50 mM sodium phosphate, 5×Denhardt's solution, 10× dextran sulphate, 20 mg/ml sheared salmon sperm DNA and washing in 0.2×SSC at about 65° C. (SSC stands for 0.15 M sodium chloride and 0.015 M trisodium citrate buffer). Alternatively, highly stringent conditions may mean hybridization at 68° C. in 0.25 M sodium phosphate, pH 7.2, 7% SDDS, 1 mM EDTA and 1% BSA for 16 hours and washing twice with 2×SSC and 0.1% SDDs at 68° C. Further alternatively, highly stringent hybridisation conditions are, for example: Hybridizing in 4×SSC at 65° C. and then multiple washing in 0.1× SSC at 65° C. for a total of approximately 1 hour, or hybridizing at 68° C. in 0.25 M sodium phosphate, pH 7.2, 7% SDS, 1 mM EDTA and 1% BSA for 16 hours and subsequent washing twice with 2×SSC and 0.1% SDS at 68° C.

[0101] For introducing the DNA molecule capable of expressing an inhibitory nucleic acid molecule into a plant or a part thereof, the DNA molecule or the expression cassette harboring the DNA may be inserted into a vector. Vectors which harbor a DNA polynucleotide for effecting inhibition of gene expression in a plant cell are known to those in the art and are also useful for the purposes of the present invention of inhibiting the expression of (a) gene(s) involved in the GPI anchor biosynthesis pathway in a fungus. In addition to the DNA molecule, the vector may comprise heterologous regulatory element(s) in the 5′ and optionally in the 3′ positions which are able to function in a plant. The vector may comprise a promoter regulatory sequence that is functional in plant cells, operably linked to the DNA molecule, and optionally a terminator regulatory sequence. Such a vector may be a hairpin vector or a double promoter vector, as known in the art. In a double promoter vector, the inserted DNA molecule is transcribed bidirectionally. An inverted double promoter allows the expression of one DNA sequence in the 3′ direction and of a second DNA sequence in the 5′ direction, whereby the resulting RNAs are substantially complementary to each other and generate dsRNA. Alternatively, two promoters or a bidirectional promoter, e.g. the mannopine synthase promoter (Guevara-Garcia et al., 1993, Tissue-specific and wound-inducible pattern of expression of the mannopine synthase promoter is determined by the interaction between positive and negative cis-regulatory elements, Plant Journal (3):495-505), may be employed such that one promoter regulates the transcription of a DNA sequence comprising a sense sequence and the second promoter regulates the transcription of a DNA sequence comprising an antisense sequence, which, however, is present on the DNA not in complementary location to the sense sequence. Suitable binary vectors for the transformation of plants are the pBINPLUS vector (van Engelen et al., 1995, Transgenic Research 4, 288-290), the pGPTV vector (Becker et al., 1992, New plant binary vectors with selectable markers located proximal to the left T-DNA border, Plant Mol. Biol., 29, 1195-1197), the p6U and p7U vector (www.dna-cloning.com).

[0102] According to the invention, the term “promoter regulatory sequence” or “promoter” is intended to mean any promoter of a gene that can be expressed in a plant. Such promoter may be a promoter which is naturally expressed in a plant or is of fungal, bacterial, or viral origin. Alternatively, the promoter may be an inducible promoter. Preferably, the promoter is a tissue specific promoter and/or a pathogen inducible promoter.

[0103] Inducible promoters are activated by one or more stimuli such as hormones (for example gibberellin, abscisic acid, jasmonic acid, salicylic acid, ethylene, auxin), chemicals (tetracycline, dexamethasone, estradiol, copper, ethanol, and benzothiadiazol), environmental conditions (light, temperature), abiotic stress (water stress, salt, stress, wounding) and biotic stress (Gurr, S. J., and Rushton, P. J., 2005. Engineering plants with increased disease resistance: How are we going to express it? Trends in Biotechnology. 23 (6), 283-290).

[0104] Pathogen-inducible promoters allow the expression of the inhibitory nucleic acid confined to the sites of infection. Native promoters, which are suitable for the pathogen-induced expression of the inhibitory nucleic acid molecule, were isolated from pathogen inducible genes (WO 2000/071732; Strittmatter, G. et al., (1996) Infections with various types of organisms stimulate transcription from a short promoter fragment of the potato gst1 gene, Mol Plant Microbe Interact 9, 68-73).

[0105] Synthetic pathogen-inducible promoters are constructed using cis-acting element building blocks and minimal promoters from various sources. The idea behind synthetic promoters is to improve the expression characteristics so as to make promoters that are more suited to the biotechnological aim. The major goal is to reduce unwanted background expression and increase promoter strength. Suited cis-acting elements, minimal promoters and synthetic pathogen-inducible promoters (4×D, 2×S-2×D) were described (WO 2000/29592; WO 2007/147395; WO 2013/091612; Gun and Rushton, 2005).

[0106] The inducible promoter can be a chimeric promoter which is composed of a plurality of elements and does not occur as such in nature. It may contain a minimal promoter and include, upstream from the minimal promoter, at least one cis-regulatory element which serves as a binding site for specific trans-acting factors (e.g. transcription factors). A chimeric promoter can be designed according to the desired requirements and is induced or repressed by different factors. The selection of the cis-regulatory element or a combination of cis-regulatory elements is critical for the specificity or the activity level of a promoter. A cis-regulatory element in a chimeric promoter is either heterologous to the minimal promoter used, i.e. the cis-regulatory element is derived from a different organism or from a different species to that of the minimal promoter used, or a cis-regulatory element in a chimeric promoter is homologous to the minimal promoter used, i.e. the cis-regulatory element and the minimal promoter also occur combined in a natural promoter, however the cis-regulatory element is localized itself or as an additional element within the chimeric promoter in a genetic environment that is different from the natural promoter. A chimeric promoter thus also means a (natural) promoter that was altered by multimerization of at least one cis-regulatory element.

[0107] Examples of promoters of plant origin are the histone promoter (EP 0 507 698) or the rice actin promoter (U.S. Pat. No. 5,641,876). Examples of promoters of a plant virus gene are the cauliflower mosaic virus (CaMV 19S or 35S), the cassava vein mosaic virus (CsVMV: WO97/48819) or the circovirus promoter (AU 689 311). Examples for tissue specific promoters are the C1 promoter, which is exclusively active in green plant tissues (Stahl D. J., Kloos, D. U., and Hehl, R. (2004). A sugar beet chlorophyll a/b binding protein void of G-box like elements confer strong and leaf specific reporter gene expression in transgenic sugar beet. BMC Biotechnology 4; 31: 12) and the root-specific Mll promoter (Oltmanns H., Kloos D. U., BrieB W., Pflugmacher M., Stahl D. J., and Hehl, R. (2006). Taproot promoters cause tissue specific gene expression within the storage root of sugar beet. PLANTA 224: 485-495). Further examples of tissue-specific promoters are the napin (EP 0 255 378), phaseolin, glutenin, helianthinin (WO 92/17580), albumin (WO 98/45460) and oleosin (WO 98/45461) promoter. Examples of inducible promoters are the promoters of phenylalanine ammonia lyase (PAL), of HMG-CoA reductase (HMG), of chitinases, of glucanases, of proteinase inhibitors (PI), of genes of the PR1 family, of nopaline synthase (nos) or of the vspB gene (U.S. Pat. No. 5,670,349), the HMG2 promoter (U.S. Pat. No. 5,670,349), the apple beta-galactosidase (ABG1) promoter or the apple amino cyclopropane carboxylate synthase (ACC synthase) promoter (WO 98/45445), or chimeric pathogen inducible promoters (WO 00/29592; WO 2007/147395; WO 2013/091612). An example of a fungal promoter is the constitutive trpC promoter of Aspergillus nidulans (Yelton et al., Transformation of Aspergillus nidulans by using a trpC plasmid, Proceedings of the National Academy of Sciences USA 81 (1984): 1470-1474).

[0108] According to the invention, the term “terminator” or “terminator regulatory sequence” is intended to mean any such sequence that is functional in a plant, also comprising polyadenylation sequences. It may be of bacterial origin such as the nos or ocs terminator of Agrobacterium tumefaciens, of viral origin such as the CaMV 35S terminator, or of plant origin such as a histone terminator as described in EP 0 633 317.

[0109] The selection step for identifying a transformed plant or a part thereof comprising the DNA molecule or a processed construct can be carried out via a selectable gene present in the vector, as referred to above. The selectable gene may comprise an operably linked promoter regulatory sequence and terminator regulatory sequence that are functional in plant cells.

[0110] Among the selectable markers that can be used in the present invention, reference is made to genes for resistance against antibiotics, such as the hygromycin phosphotransferase gene, the neomycin phosphotransferase II gene inducing resistance against kanamycin, or the aminoglycoside 3′-adenyltransferase gene, genes for tolerance to herbicides such as the bar gene (White et al., A cassette containing the bar gene of Streptomyces hygroscopicus: a selectable marker for plant transformation, Nucl. Acids Res., 1990, 18: 1062) for tolerance to bialaphos, the EPSPS gene (U.S. Pat. No. 5,188,642) for tolerance to glyphosate or else the HPPD gene (WO 96/38567) for tolerance to isoxazoles, genes encoding identifiable enzymes, such as the GUS enzyme, GFP protein or genes encoding pigments or enzymes regulating pigment production in the transformed cells. Such selectable marker genes are in particular described in patent applications WO 91/02071, WO 95/06128, WO 96/38567, and WO 97/04103.

[0111] Marker gene free transformation is another alternative to transfer the expression cassette of interest into the plant. For introducing the DNA molecule into a plant or a part thereof, numerous methods are known in the art. A preferred method applied in the present invention is transformation of the DNA molecule, expression cassette or vector harboring the DNA molecule by the use of bacteria of the Agrobacterium genus, preferably by infection of the cells or tissues of plants with A. tumefaciens (Knopf U. C., 1979, Crown-gall and Agrobacterium tumefaciens: survey of a plant cell transformation system of interest to medicine and agriculture, Subcell. Biochem. 6: 143-173; Shaw C. H. et al., 1983, A general method for the transfer of cloned genes to plant cells, Gene 23(3): 315-330) or A. rhizogenes (Bevan M. W. and Chilton M., 1982, T-DNA of the Agrobacterium Ti and Ri plasmids, Annu. Rev. Genet. 16: 357-384; Tepfer M. and Casse-Delbart F., 1987, Agrobacterium rhizogenes as a vector for transforming higher plants, Microbiol. Sci. 4(1): 24-28). For example, the transformation of plant cells or tissues with Agrobacterium tumefaciens is carried out according to the protocol described by Hiei Y. et al. (1994, Efficient transformation of rice (Oryza sativa L.) mediated by Agrobacterium and sequence analysis of the boundaries of the T-DNA, Plant J. 6(2): 271-282). Another preferred method is the biolistic transformation method, wherein cells or tissues are bombarded with particles onto which the vectors of the invention are adsorbed (Bruce W. B. et al., 1989, Photoregulation of a phytochrome gene promoter from oat transferred into rice by particle bombardment, Proc. Natl. Acad. Sci. USA 86(24): 9692-9696; Klein T. M. et al., 1992, Transformation of microbes, plants and animals by particle bombardment, Biotechnology 10(3): 286-291; U.S. Pat. No. 4,945,050). A further method is the widely used protoplast transformation. Therefor, plant cells are separated by pectinases and subsequently, the cell wall is degraded to generate protoplasts. For transformation, polyethylene glycol is added or electroporation is applied. Other methods are bringing the plant cells or tissues into contact with polyethylene glycol (PEG) and the vectors of the invention (Chang S. and Cohen S. N., 1979, High frequency transformation of Bacillus subtilis protoplasts by plasmid DNA, Mol. Gen. Genet. 168(1): 111-115; Mercenier A. and Chassy B. M., 1988, Strategies for the development of bacterial transformation systems, Biochimie 70(4): 503-517). Electroporation is another method, which consists in subjecting the cells or tissues to be transformed and the vectors of the invention to an electric field (Andreason G. L. and Evans G. A., 1988, Introduction and expression of DNA molecules in eukaryotic cells by electroporation, Biotechniques 6(7): 650-660; Shigekawa K. and Dower W. J., 1989, Electroporation: a general approach to the introduction of macromolecules into prokaryotic and eukaryotic cells, Aust. J. Biotechnol. 3(1): 56-62). Another method consists in directly injecting the vectors into the cells or the tissues by microinjection (Gordon and Ruddle, 1985, DNA-mediated genetic transformation of mouse embryos and bone marrow—a review, Gene 33(2): 121-136). Those skilled in the art will choose the appropriate method according to the nature of the plant to be transformed and the fungus against which the plant is to be rendered resistant.

[0112] Cells or tissues of plants, e.g., root cells grown in culture, can be transformed with the desired gene and grown into mature plants. When transformation is effective, the transgene will be incorporated into the pollen and eggs and passed onto the next generation.

[0113] In one embodiment, the DNA molecule or expression cassette is stably integrated into the genome of the transgenic plant, preferably into a chromosome of the plant. Integration can, however, also occur into an extrachromosomal element. By stable integration into the genome of a plant, the DNA sequences can be passed to subsequent generations of the transgenic plant. Alternatively, the DNA molecule or expression cassette is present within the plant cell on the vector used to introduce the DNA molecule and is not stably integrated into the genome of the plant. Therefore, the DNA sequences may not be passed to subsequent generations of the plant.

[0114] According to the invention, all plants and all parts of a plant can be treated according to the methods of the present invention. By plants is meant all plants and plant populations such as desirable and undesirable wild plants, and cultivars. Plants can be plants obtained by conventional propagation and breeding methods which can be assisted or supplemented by one or more biotechnological methods such as by use of double haploids, protoplast fusion, random or directed mutagenesis, molecular or genetic markers or by bioengineering or genetic engineering methods.

[0115] The term “part of a plant” refers to any parts or organs of a plant such shoot vegetative organs/structures, e.g., leaves, stems or tubers; roots, flowers or floral organs/structures, e.g. bracts, sepals, petals, stamens, carpels, anthers or ovules; seed, including embryo, endosperm or seed coat; fruit or the mature ovary; plant tissue, e.g. vascular tissue or ground tissue; or cells, e.g. guard cells, egg cells or trichomes; or progeny of the same. The term “cell” refers to a cell or cell accumulation within the plant as well as to an isolated cell or isolated cell accumulation. A cell may have a cell wall or may be a protoplast. In particular, the present invention relates to a seed which comprises the DNA, expression cassette or vector as comprised by the present invention. Preferably, the seeds of a transgenic plant retain the DNA, expression cassette or vector as comprised by the invention, so that the new plants generated from a seed continues to comprise the DNA, expression cassette or vector,

[0116] Plants that can be protected by the method according to the invention comprise all plants, preferably plants of economic interest, more preferably the plant according to the present invention is selected from the group consisting of barley (Hordeum vulgare), sorghum (Sorghum bicolor), rye (Secale cereale), Triticale, sugar cane (Saccharum officinarium), maize (Zea mays), foxtail millet (Setaria italic), rice (Oryza sativa), Oryza minuta, Oryza australiensis, Oryza alta, wheat (Triticum aestivum), Triticum durum, Hordeum bulbosum, purple false brome (Brachypodium distachyon), sea barley (Hordeum marinum), goat grass (Aegilops tauschii), apple (Malus domestica), strawberry, sugar beet (Beta vulgaris), sunflower (Helianthus annuus), Australian carrot (Daucus glochidiatus), American wild carrot (Daucus pusillus), Daucus muricatus, carrot (Daucus carota), eucalyptus (Eucalyptus grandis), Erythranthe guttata, Genlisea aurea, woodland tobacco (Nicotiana sylvestris), tobacco (Nicotiana tabacum), Nicotiana tomentosiformis, tomato (Solanum lycopersicum), potato (Solanum tuberosum), coffee (Coffea canephora), grape vine (Vitis vinifera), cucumber (Cucumis sativus), mulberry (Morus notabilis), thale cress (Arabidopsis thaliana), Arabidopsis lyrata, sand rock-cress (Arabidopsis arenosa), Crucihimalaya himalaica, Crucihimalaya wallichii, wavy bittercress (Cardamine flexuosa), peppergrass (Lepidium virginicum), sheperd's-purse (Capsella bursa-pastoris), Olmarabidopsis pumila, hairy rockcress (Arabis hirsuta), rape (Brassica napus), broccoli (Brassica oleracea), Brassica rapa, Brassica juncacea, black mustard (Brassica nigra), radish (Raphanus sativus), Eruca vesicaria sativa, orange (Citrus sinensis), Jatropha curcas, cotton (Gossipium sp.), soybean (Glycine max), and black cottonwood (Populus trichocarpa). Particularly preferred, the plant is selected from the group consisting of barley (Hordeum vulgare), sorghum (Sorghum bicolor), rye (Secale cereale), Triticale, sugar cane (Saccharum officinarium), maize (Zea mays), rice (Oryza sativa), wheat (Triticum aestivum), Triticum durum, Avena sativa, Hordeum bulbosum, sunflower (Helianthus annuus), carrot (Daucus carota), tobacco (Nicotiana tabacum), tomato (Solanum lycopersicum), potato (Solanum tuberosum), coffee (Coffea canephora), grape vine (Vitis vinifera), cucumber (Cucumis sativus), thale cress (Arabidopsis thaliana), rape (Brassica napus), broccoli (Brassica oleracea), Brassica rapa, Brassica juncacea, black mustard (Brassica nigra), radish (Raphanus sativus), cotton (Gossipium sp.) and soybean (Glycine max).

[0117] The invention concerns a method of producing a transgenic plant or a part thereof, comprising the steps of introducing into at least a cell of the plant the DNA or the expression cassette or the vector as comprised by the invention, and regenerating the transgenic plant from the at least one cell.

[0118] As used herein “regenerating” or “regeneration” means a process of growing an entire plant from a single cell, a group of cells, a part of the plant or a tissue of the plant. The skilled person knows methods of introducing DNA into at least a cell of the plant and growing a plant therefrom. “At least a cell” means a single cell, a group of cells, a part of the plant or a tissue of the plant.

[0119] Furthermore, the invention concerns a method of conferring fungal resistance on a plant or a part thereof comprising the steps of introducing into the plant or the part thereof the DNA or the expression cassette or the vector as comprised by the invention, and causing expression of the DNA or the expression cassette.

[0120] As used herein, the term “causing expression” means that under the conditions, under which the plant is kept and/or cultivated, transcription of the DNA having been introduced into the plant is induced. For example, if the promoter is an inducible promoter, the activity of such promoter can be induced by the presence or absence of specific biotic or abiotic factors, according to the choice of the user of the present invention. If the promoter is a constitutive promoter, expression continuously occurs.

[0121] Furthermore, the invention concerns a method of inhibiting the expression of the gene(s) involved in the GPI anchor biosynthesis pathway in a fungus, comprising applying the DNA or the expression cassette or the vector as comprised by the invention to the fungus or to a plant or a part thereof.

[0122] As used herein “applying . . . to the fungus or to a plant or a part thereof” or a similar term means that the DNA, expression cassette or vector as comprised by the invention are administered to the fungus, plant or part thereof so that the fungus, plant or part thereof incorporate and express the DNA. The application on the plant may be in the laboratory using any methods of introducing the DNA, expression cassette or vector, as referred to above, into the plant or the part thereof. The application on the plant may also be in the field in order to render the plant which may be infected by a phyto-pathogenic fungus resistant against the fungus. The application may also be directly on the fungus in order to cause cessation of infection, growth, development, reproduction and/or pathogenicity and eventually death of the fungus. “Directly” means that the DNA, expression cassette or vector is applied on the fungus, so that the DNA, expression cassette or vector is introduced into the fungus without plant involvement. The fungus may have already infected the plant or may still be present outside the plant such as in the soil. The application in the field may occur by any method known in the art of applying a fungicide, such as spraying or splashing.

[0123] Furthermore, the invention concerns the use of the DNA or the expression cassette or the vector as comprised by the invention for inactivating a fungus, while contacting a plant or a part thereof; for protecting a plant against an infection by a fungus; or for inhibiting the expression of the gene involved in the GPI anchor biosynthesis pathway, preferably the GPI1, GPI2, GPI3, GPI15, ERI1, GPI19, GPI12, GWT1, GPI14, PBN1, GPI18, MCD4, GPI10, SMP3, GPI13, GPI11, GPI7, GAA1, GPI8, GPI16, GPI17, GAB1, and/or BST1 gene(s), more preferably the GPI12, GAA1, GPI8 and/or GWT1 gene(s), in a fungus.

[0124] As used herein, “inactivating a fungus” means causing cessation of infection, growth, development, reproduction and/or pathogenicity and eventually death of the fungus. Inactivation can occur by RNA molecules directed against the gene or mRNA involved in the GPI anchor biosynthesis pathway of the fungus produced by the transgenic plants. Alternatively, inactivation occurs by applying the DNA, expression cassette or vector as comprised by the present invention onto the fungus outside the plant, such as in the field. Inactivation of the fungus is obtained by reduction of the expression of the gene or mRNA involved in the GPI anchor biosynthesis pathway of the fungus, resulting in the reduction of the damages of the plant.

[0125] As used herein, “while contacting a plant” means that the fungus is in touch with the plant. Thus, the fungus is forming or has already formed structures to invade into a cell of the plant. This means that differentiated structures of the fungus such as an appressorium are forming or has already formed and is penetrating or has already penetrated into a cell of the plant.

[0126] As used herein, “protecting a plant” means conferring resistance against the fungus on the plant. A resistant plant is not infested and/or damaged by a fungus or is infested and/or damaged by a fungus to a lower extent as compared to a plant of a similar phenotype or the same genotype which is not treated according to the present invention. By introducing a DNA capable of expressing an inhibitory nucleic acid into a plant or a part thereof, resistance against a fungus harboring the gene(s) involved in the GPI anchor biosynthesis pathway, against which the inhibitory molecule is directed, is obtained, so that the plant is protected from the fungus. To determine the resistance, the transgenic plant may be compared with a control plant which has a similar phenotype or the identical genotype, however, does not contain the transgene. Resistance can be determined using an optical score wherein scores from non-resistant, if the symptoms of the transgenic plant correspond to those of the non-transgenic plant, to highly resistant, if no symptoms of fungus infection are seen, may be awarded. Alternatively, resistance can be determined by determining the transcript amount(s) of the RNA(s) involved in the GPI anchor biosynthesis pathway in the fungus during infection of a transgenic plant, as compared to the transcript amounts of the fungus of identical genotype infected on a plant of identical genotype, which does not contain the transgene of the present invention, or in the fungus of same genotype which does not infect a plant. The present inventors have found that, dependent on the amount of transcript reduction, vegetative fungal growth, asexual spore formation, formation of fungal infection structures, and infection rates are impaired, and plant resistance is enhanced. Reduction of the transcript amounts of RNA(s) involved in the GPI anchor biosynthesis pathway by about 40% was sufficient to see an effect on the parameters, cited above. Thus, transcript reduction of at least 40%, 50%, 60%, 70%, 80%, 90%, 95% or of 100% for the transcript(s) involved in the GPI anchor biosynthesis pathway allows scoring the transgenic plant as being resistant or as having resistance against a fungus. Preferably, the damages on the plant are reduced by at least 50%, 60%, 70%, 80%, 90% or by 100% in a resistant transgenic plant according to the present invention as compared to a plant of similar phenotype or the identical genotype, which does not contain the transgene of the present invention.

[0127] The invention also concerns a composition comprising the DNA molecule capable of expressing inhibitory nucleic acid molecules capable of inhibiting the expression of a gene involved in the GPI anchor biosynthesis pathway involved in the GPI anchor biosynthesis pathway in a fungus, a composition comprising an expression cassette comprising the DNA molecule, a composition comprising a vector comprising the DNA molecule or a composition comprising dsRNA capable of inhibiting the expression of a gene involved in the GPI anchor biosynthesis pathway in a fungus. The composition may be for external application on a plant and/or a fungus.

[0128] Alternatively, the composition may contain dsRNA, wherein one strand of this RNA comprises an antisense sequence which is substantially complementary to the gene involved in the GPI anchor biosynthesis pathway and the other strand comprises a sense sequence which is substantially complementary to the antisense sequence. The dsRNA may be an hpRNA, miRNA or siRNA. The definitions of dsRNA, sense and antisense sequences are given above. When the composition is applied to a plant and/or to a fungus from the outside, such as in the field, the dsRNA may be incorporated into the plant and/or the fungus and may inhibit the expression of a gene involved in the GPI anchor biosynthesis pathway in the fungus via gene silencing such as via the antisense mechanism or the RNAi mechanism.

[0129] Double-stranded RNA for the manufacture of the composition in accordance with the invention can be produced in vitro using methods known to the skilled person. Thus, the dsRNA may be synthesized by genetic engineering methods from a DNA or by biosynthesis methods.

[0130] The composition in accordance with the invention may be used as a fungicide for a plant or a part thereof which is already infected by a fungus or will be potentially infected. The composition may also be used against the fungus, which has already infected the plant or which has not infected the plant, for example when the fungus is still outside the plant, for example, in the soil. In this regard, the composition is used to control the growth of the pathogenic fungus either by the treatment of a plant or by the application on the fungus. The skilled person knows fungicide compositions and knows which further ingredients such as carrier substrates, whereby the carrier substrate has, for example, an RNA-stabilizing effect, to include into the composition and what methods to use in order to prepare and apply the composition to a plant and/or fungus in the field. The composition in accordance with the invention may furthermore be used as a pre-treatment for seed.

[0131] The invention is further explained in the following figures and examples which are included for illustration purposes and are not intended to limit the invention.

### FIGURES

[0132] FIG. 1: The main pathway of GPI biosynthesis in yeast. The pathway is composed of 12 biosynthetic steps. The involved yeast genes are shown (inspired by Pittet and Conzelmann, 2007).

[0133] FIG. 2: Similarity of GPI12, GAA1 and GPI8 genes from different fungal origin ascomycota include F. fujikuroi, F. oxysporum, F. graminearum, F. solani, T. vireos, B. bassiana, N. crassa, M. oryzae, C. gloeosporioides, C. graminicola, C. higginsianum, C. purpurea, G. graminis, N. crassa, yeasts include P. brasiliensis, C. glabrata, S. cerevisiae, S. arboricola, S. pombe, C. albicans, basidiomycota include B. graminis, P. graminis, T. stipitatus, R. solani, L. bicolor, T. mameffei, U. hordei, U. maydis.

[0134] FIG. 3: Reduction of GPI12, GAA1 and GPI8 transcript accumulation in the fungal pathogen Colletotrichum graminicola by RNAi; A: RNAi constructs designed to reduce GPI12, GAA1 and GPI8 transcripts in C. graminicola; B: Determination of the copy number of transformed constructs in transformants of C. graminicola. WT=wild type; C: Reduced GPI12, GAA1 and GPI8 transcript accumulation in the RNAi strains as shown by qRT-PCR.

[0135] FIG. 4: Reduced transcript levels of GPI12, GAA1 and GPI8 impair the vegetative growth of the fungal pathogen Colletotrichum graminicola; A: Reduction of vegetative growth of GPI12, GAA1 and GPI8 RNAi strains in a vegetative growth assay dependent from the transcript abundance (see FIG. 3); B: Malformation of fungal hyphae in GPI12, GAA1 and GPI8 RNAi strains as shown by microscopical analysis. WT=wild type.

[0136] FIG. 5: Reduced transcript levels of GPI12, GAA1 and GPI8 impair asexual spore formation and spore germination; A: Malformation of conidia from GPI12, GAA1 and GPI8 RNAi strains on oat meal agar (OMA) supplemented with 1 M sorbitol. WT=wild type; B: Absence of conidia (non-stabilized medium) or strongly reduced conidia formation (osmotically stabilized medium, 0.5 M KCl or 1 M sorbitol) of GPI12, GAA1 and GPI8 RNAi strains in comparison to the wild type (WT); C: Appressoria of GPI12, GAA1 and GPI8 RNAi strains explode on an artificial surface; D: Reduced germination and infection structure (appressoria) formation of GPI12, GAA1 and GPI8 RNAi strains compared to the wild type (WT).

[0137] FIG. 6: Reduced transcript levels of GPI12, GAA1 and GPI8 result in reduced infection rates on corn leaves; A: Loss of pathogenicity of GPI12, GAA1 and GPI8 RNAi strains on intact corn leaves and strong reduction of virulence on wounded leaves; B: Strong reduction of RNAi strain fungal biomass in infected corn leaves as shown by qPCR; C: Severely distorted infections hyphae of the GPI12, GAA1 and GPI8 RNAi strains at the inoculation site on wounded corn leaves.

[0138] FIG. 7: The GWT1 gene is important for the growth of Fusarium graminearum as shown by the chemical induction of an RNAi_{GWT1} construct; A: Design of the chemical inducible fungal promoter: The tetracyclin dependent transactivator rtTA binds in the presence of doxyzyclin (Dox) at the tet0 promoter and allows the expression of the coding region. The promoter is silent in the absence of doxycycline; B: Growth retardation of the Fusarium transformants 1280_13, 1280_17 and 1280_5 after Dox induction of a transformed RNAi_{GWT1} construct.

[0139] FIG. 8: Hairpin RNAi vector pRNAi-HIGS-AsGpi8 designed for the generation of HIGS_{GPI8} potato lines. The GPI8 sequence of Alternaria solani was inserted into a hairpin RNAi-construct. The 2 identical fragments of the GPI gene (dsRNA AsGPI8) are orientated in a forward and a reverse orientation and are separated by the intron 2 of the AtAAP2 gene of Arabidopsis thaliana. 35S=promoter of the 35S CaMV gene, A, ter=terminator of the CaMV 35S gene, AtAAP2 intron=intron of the AAP2 gene.

[0140] FIG. 9: Detection of GPI8 transcriptional silencing activity in HIGS_{GPI8} lines. The transcriptional silencing activity of line PR-H-36-T-017 was the highest in comparison to other HIGS_{GPI8} potato lines.

[0141] FIG. 10: Double promoter RNAi binary vector p6U-35S-fg00700-35S designed for the generation of HIGS_{GWT1} wheat lines. The GWT1 sequence of Fusarium graminearum was inserted into a double promoter RNAi-construct. In the double promoter construct the HIGS target gene is flanked by two 35S promotors in a forward and a reverse orientation which will result in the biosynthesis of a sense and an antisense transcript. Ubi-int=ubiquitin promoter, hpt=Hygromycin resistance gene, T35S=terminator of the CaMV 35S gene, BR=right border of T-DNA BL=left border of T-DNA, Sm/Sp=streptomycin selection marker.

[0142] FIG. 11: Enhanced Fusarium resistance and reduced DON content of the HIGS_{GWT1} wheat line. The HIGS_{GWT1} wheat line WA336-T-018 showed a reduced AUDPC (18 d.p.i) value (filled columns) in comparison to the transformation genotype Taifun and a transgenic Taifun control. The transgenic control was transformed with a reporter gene construct which should not influence resistance. The disease score was calculated as mean from 26 or 30 infected heads. The concentration of the mycotoxin DON (striped columns) was also reduced in the infected heads of the HIGS line in comparison to Taifun lines as shown by ELISA. The reference lines, Aurum, Scirocco and Tybalt, are also shown. Aurum was the wheat cultivar with the best Fusarium resistance available in Germany. BSA (Bundessortenamt, Germany) scores describe the resistance of these lines in the field (1-9).

[0143] FIG. 12: Enhanced Fusarium resistance and reduced fungal biomass of the HIGS_{GWT1} wheat line. The HIGS_{GWT1} wheat line WA336-T-018 showed a reduced AUDPC (18 d.p.i) value (line) in comparison to the transformation genotype Taifun and a transgenic Taifun control. The transgenic control was transformed with a reporter gene construct which should not influence resistance. The AUDPC value was calculated as mean from the infected heads used for the determination of the fungal biomass. The fungal biomass (columns) was also reduced in the infected heads of the HIGS line in comparison to Taifun lines as shown by qPCR. The reference lines, Aurum, Scirocco and Tybalt, are also shown. Aurum was the wheat cultivar with the best Fusarium resistance available in Germany. Since Aurum has some negative agronomical properties the cultivation is very limited. BSA scores describe the resistance of these lines in the field (1-9).

[0144] FIG. 13: Enhanced Fusarium head scab resistance of the HIGS line WA-336-T-018 at field trials in the USA. Shown is the mean of disease severity (1-9) at two locations. 1=healthy heads, 9=100% bleached heads.

[0145] FIG. 14: Enhanced early blight resistance of the HIGS potato line PR-H-36-T-017 as shown under near field conditions at field trials in Germany: A: Shown are plants of the plots at the end of the trial. Hermes=genotype used for transformation (left), transgenic control HIGS_{GFP} used as negative control (central), PR-H-36-T-017=HIGS_{GPI8} line showing enhanced Alternaria solani (early blight) resistance (right); B: Disease scores of early blight assay 50 days after inoculation (mean of 3 plots with 6 plants each). The transformation genotype Hermes and the transgenic control, which was transformed with an RNAi construct against the green fluorescence protein (GFP) showed a destruction of the plants by 80 and 87%, respectively. The HIGS_{GPI8} lines PR-H-36-T-002 and PR-H-36-T-017 showed only a plant damage of 70 and 58%.

[0146] FIG. 15 A-L: GPI12 protein alignment: Identification of conserved amino acid sequences in the GPI12 proteins of several fungal pathogens (Blumeria graminis f. sp. hordei (Bgh), Blumeria graminis f. sp. tritici (Bgt), Bipolaris maydis (Bpm), Bipolaris victoriae (Bpv), Bipolaris zeicola (Bpz), Pyrenophora tritici-repentis (Pyrteres), Pyrenophora teres f. teres (Pyrt), Leptosphaeria macularis (Lm), Mycosphaerella graminicola (Mg), Puccinia graminis tritici (Pg), Puccinia striiformis (Ps), Puccinia triticina (Pt), Ustilago hordei (Uh), Ustilago maydis (Um), Sclerotinia sclerotiorum (Scs), Gaeumannomyces graminis var. tritici (Gg), Magnaporthe oryzae (Mo), Colletotrichum gloeosporioides (Colgl), Colletotrichum graminicola (Colgr), Colletotrichum higginsianum (Colh), Fusarium fujikuroi (Fuse, Fusarium oxysporum (Fuso), Fusarium graminearum (Fusg), Claviceps purpurea (Clp), Verticillium dahliae (Vd)). Selected conserved regions are underlined.

[0147] FIG. 16 A-N: GWT1 protein alignment: Identification of conserved amino acid sequences in the GWT1 proteins of ascomycota and basidiomycota. The GWT1 sequences of several fungal pathogens (Alternaria solani (Alt), Pyrenophora teres f. teres (Pyr_ter), Pyrenophora tritici-repentis (Pyr_tr), Blumeria graminis f. sp. tritici (Bg_t), Botrytis cinerea (Bot_c), Sclerotinia sclerotiorum (Scl_scl), Colletotrichum fioriniae (Col_fio), Colletotrichum graminicola (Col_gram), Colletotrichum higginsianum (Col_hig), Fusarium graminearum (Fus_gra), Fusarium pseudograminearum (Fus_pseu), Fusarium oxysporum (Fus_oxy), Fusarium verticillioides (Fus_ver), Fusarium solani (Fus_sol), Magnaporthe oryzae (Mag_ory), Cercospora beticola (Cb), Sphaerulina musiva (Sph_mus), Mycosphaerella fijiensis (Myc_fij), Septoria tritici (Sep_tri), Zymoseptoria brevis (Zym_bre), Mycosphaerella pini (Myc_pin), Melampsora populina (Mel_pop), Puccinia graminis tritici (Puc_gr-t), Leptosphaeria maculans (Lep_mac), Septoria nodorum (Sep_nod), Setosphaeria turcica (Set_tur), Bipolaris maydis (Bip_may), Bipolaris oryzae (Bip_ory), Bipolaris sorokiniana (Bip_sok), Bipolaris victoriae (Bip_vic), Bipolaris zeicola (Bip_zeic)). Selected conserved regions are underlined.

[0148] FIG. 17 A-O: GAA1 protein alignment: Identification of conserved amino acid sequences in the GAA1 proteins of ascomycota (Cercospora beticola (Cb), Mycosphaerella graminicola (Mg), Bipolaris oryzae (Bpo), Bipolaris zeicola (Bpz), Leptosphaeria maculans (Lm), Botrytis cinerea (Bc), Blumeria graminis f. sp. hordei (Bgh), Blumeria graminis f. sp. tritici (Bgt), Colletotrichum gloeosporioides (Colg), Colletotrichum graminicola (Colgr), Colletotrichum orbiculare (Colob), Verticillium alfalfa (Va), Verticillium dahliae (Vd), Fusarium fujikuroi (Fusfuji), Fusarium oxysporum (Fusox), Fusarium graminearum (Fusg), Fusarium solani (Fussol), Gaeumannomyces graminis var. tritici (Gg), Magnaporthe oryzae (Mo)). Selected conserved regions are underlined.

[0149] FIG. 18 A-K: GPI8 protein alignment: Identification of conserved amino acid sequences of GPI8 proteins of ascomycota and basidiomycota (Blumeria graminis f. sp. tritici (Bgt), Botrytis cinerea (Botcinerea), Bipolaris maydis (Bimaydis), Bipolaris sorokiniana (Bisorokinia), Pyrenophora teres f. teres (Pyrteres), Pyrenophora tritici-repentis (Pyrtritici-repentis), Leptosphaeria maculans (Lmaculans), Puccinia graminis (Pgraminis), Ustilago hordei (Uhordei), Ustilago maydis (Umaydis), Fusarium graminearum (Fgraminearum), Fusarium oxysporum (Foxysporum), Colletotrichum gloeosporioides (Colgloeosporioides), Colletotrichum graminicola (Colgrminicola), Colletotrichum higginsianum (Colhigginsianum), Gaeumannomyces graminis var. tritici (Ggraminis), Magnaporthe oryzae (Mgoryzae), Verticillium dahliae (Vdahlia)). Selected conserved regions are underlined.

### EXAMPLES

### Results

### Identification of Target Proteins and Genes

[0150] The assembly of the GPI complex and its covalent attachment to the C-terminus of proteins is a ubiquitous process in eukaryotic cells which serves to post-translationally modify proteins to anchor them to the cell surface. Thereby, a substantial amount of the estimated 61 GPI-anchored proteins identified in baker's yeast play a major role in cell wall structure and rigidity. They serve enzymatic functions required for the biosynthesis and the continuous shape adaptations of the cell wall, others seem to be structural elements of the cell wall and yet others mediate cell adhesion. The assembly of the GPI anchor and its attachment to proteins in Saccharomyces cerevisiae is presented in FIG. 1 where in a series of steps the GPI complex is build and attached to a protein. The different biosynthetic steps are mediated by approx. 25 proteins and take place successively on the cytoplasmic and on the luminal face of the ER membrane. The proteins which are involved comprise GPI1, GPI2, GPI3, GPI15, ERI1, GPI19, GPI12, GWT1, GPI14, PBN1, GPI18, MCD4, GPI10, SMP3, GPI13, GPI11, GPI7, GAA1, GPI8, GPI16, GPI17, GAB1, and BST1. The first step of GPI biosynthesis is the addition of N-acetyl glucosamine to phosphatidylinositol. This reaction occurs on the cytoplasmic ER surface and is catalyzed by N-acetyl glucosaminyl transferase, an unusually complex glycosyl transferase consisting of the six core proteins GPI1, GPI2, GPI3, GPI15, ERI1, and GPI19. The acetyl group of the N-acetyl glucosaminyl residue is then removed by the cytoplasmic N-acetylglucosaminylphosphatidylinositol deacetylase encoded by GPI12, and the glucosamine formed is enzymatically 2-O-palmitolyated, using acyl-CoA as the acyl donor. The resulting intermediate is translocated to the luminal side of the phospholipid bilayer. In the ER lumen, two mannosyl units are subsequently linked to the glucosamine by the two distinct ER-resident mannosyl transferases GPI14 and GPI18. Interestingly, analysis of the substrate specificity of the first dolichol phosphate mannose:glucosaminyl phosphatidylinositol α1-4-mannosyltransferase of the glycosyl-phosphatidylinositol biosynthetic pathway of African trypanosomes showed that N-acetylglucosaminylphosphatidylinositol is more efficiently presented to the enzyme than its deacetylated form, suggesting important substrate channelling via the preceding deacetylase GPI12 (Smith, 1996). Next, the addition of a phosphoryl-ethanolamine residue to the first mannosyl unit, is catalyzed by Mcd4. The phosphoryl-ethanolamine group linked to the first mannosyl residue is required for both recognition of the GPI by the third mannosyl transferase GPI10, as well as by the transamidase complex. In yeast, the addition of a fourth onto the third mannosyl residue by SMP3 is required for adding a phosphoethanolamine group to the third mannosyl residue, as catalyzed by GPI13. The last step of GPI biosynthesis before attaching this anchor to a protein is the addition of a third phosphoryl-ethanolamine residue, which is mediated by ethanolamine phosphotransferase GPI7. The attachment of GPI to a protein is catalyzed by the GPI transamidase complex, a protein complex consisting of the five distinct subunits GPI8, GPI16, GAA1, GAB1, and GPI17, organized into three components. According to a recent model, the central part and the catalytic domain of the GPI transamidase complex is GPI8. GPI8 interacts with Gaa1 and with all other subunits of the GPI transamidase complex. The work by Udenfriend and colleagues suggested that GPI8 is a cystein protease cleaving the C-terminal pro-peptide of the substrate protein even in the absence of the GPI anchor (Maxwell, 1995). Importantly, GAA1 has recently been suggested to function as a metallo-peptide-synthetase catalyzing formation of the peptide bond between the substrate protein's w-site and the GPI lipid anchor's phosphoethanolamine. The complex reactions involved in biosynthesis of GPI and attachment of the GPI anchor to proteins are conserved from yeast to men.

[0151] Enzymes and proteins involved in protein-anchoring via GPI are conserved in fungi. Reference is made to FIG. 2, where the similarity of three selected proteins, GPI12, GAA1 and GPI8, of various species is shown in dendrograms. Protein and nucleic acid sequences of GPI1, GPI2, GPI3, GPI15, ERI1, GPI19, GPI12, GWT1, GPI14, PBN1, GPI18, MCD4, GPI10, SMP3, GPI13, GPI11, GPI7, GAA1, GPI8, GPI16, GPI17, GAB1, and BST1 of selected fungal species are state of the art. Exemplary proteins are referred to herein by their accession numbers (see also below) and are disclosed, in the order of appearance, in the sequence listing under SEQ ID NOs: 1 to 400. The indicated sequences may serve as reference sequences for identifying homologous proteins and genes in other fungal species, characterized by a degree of identity of at least 60, 70, 80, 85, 90, 95 or 99% or by a degree of homology of at least 40, 50, 60, 70, 80, 85, 90, 95 or 99% on the amino acid level or by a degree of identity of at least 30, 40, 50, 60, 70, 80, 85, 90, 95 or 99% on the nucleic acid level or by hybridization under stringent hybridization conditions with respect to the reference sequence.

[0152] Preferred target genes and proteins of the present invention are GPI12, GAA1, GPI8, and GWT1. Exemplary organisms and the accession numbers under which amino acid and nucleotide sequences are to be found are listed in Tables 1 to 4.

TABLE 1
The following list indicates the organisms and the accession numbers under which amino
acid and nucleotide sequences of GPI12 are to be found. These amino acid and nucleotide
sequences are disclosed, in the order of appearance, in the sequence listing under SEQ
ID NOs: 1-86 and 393-396 (odd numbers are nucleotide sequences and subsequent even numbers
are corresponding amino acid sequence, exceptions are SEQ ID NOs: 395 and 396 which
are amino acid sequences without corresponding nucleotide sequences).

| | amino acid sequence | sequence identifier | sequence identifier |
|---|---|---|---|
| | GPI12; uniprot or NCBI | of nucleotide | of amino acid |
| Fungal pathogen | reference sequence | sequence | sequence |
| Alternaria solani | no reference | SEQ ID NO: 393 | SEQ ID NO: 394 |
| Blumeria graminis f. sp. tritici | EPQ62736.1 | SEQ ID NO: 1 | SEQ ID NO: 2 |
| 96224 | | | |
| Blumeria graminis f. sp. hordei | CCU76388.1 | SEQ ID NO: 3 | SEQ ID NO: 4 |
| DH14 | | | |
| Bipolaris maydis C5 | EMD87943.1 | SEQ ID NO: 5 | SEQ ID NO: 6 |
| Bipolaris oryzae ATCC 44560 | W6ZBJ1_COCM | SEQ ID NO: 11 | SEQ ID NO: 12 |
| Bipolaris victoriae FI3 | EUN24454.1 | SEQ ID NO: 7 | SEQ ID NO: 8 |
| Bipolaris zeicola 26-R-13 | XP_007713568.1 | SEQ ID NO: 9 | SEQ ID NO: 10 |
| Botryosphaeria parva | R1E9V7_BOTPV | SEQ ID NO: 15 | SEQ ID NO: 16 |
| Botrytis cinerea B05.10 | XP_001550141.1 | SEQ ID NO: 13 | SEQ ID NO: 14 |
| Cercospora beticola | no reference | SEQ ID NO: 17 | SEQ ID NO: 18 |
| Cochliobolus sativus | M2T701_COCSN | SEQ ID NO: 19 | SEQ ID NO: 20 |
| Colletotrichum graminicola | EFQ25317.1 | SEQ ID NO: 21 | SEQ ID NO: 22 |
| M1.001 | | | |
| Colletotrichum gloeosporioides | EQB47646.1 | SEQ ID NO: 23 | SEQ ID NO: 24 |
| Cg-14 | | | |
| Colletotrichum higginsianum | CCF33957.1 | SEQ ID NO: 25 | SEQ ID NO: 26 |
| Claviceps purpurea 20.1 | CCE27514.1 | SEQ ID NO: 27 | SEQ ID NO: 28 |
| Diplodia seriata | A0A0G2GVF3_9PEZI | SEQ ID NO: 29 | SEQ ID NO: 30 |
| Fusarium fujikuroi IMI 58289 | CCT73649.1 | SEQ ID NO: 31 | SEQ ID NO: 32 |
| Fusarium graminearum PH-1 | XP_384272.1 | SEQ ID NO: 33 | SEQ ID NO: 34 |
| Fusarium oxysporum Fo5176 | EGU74772.1 | SEQ ID NO: 35 | SEQ ID NO: 36 |
| Fusarium pseudograminearum | K3V2Z5_FUSPC | SEQ ID NO: 37 | SEQ ID NO: 38 |
| (strain CS3096) | | | |
| Gaeumannomyces graminis var. | EJT81184.1 | SEQ ID NO: 39 | SEQ ID NO: 40 |
| tritici R3-111a-1 | | | |
| Leptosphaeria maculans JN3 | XP_003840011.1 | SEQ ID NO: 41 | SEQ ID NO: 42 |
| Macrophomina phaseolina (strain | K2SFE7_MACPH | SEQ ID NO: 43 | SEQ ID NO: 44 |
| MS6) | | | |
| Magnaporthe oryzae 70-15 | XP_003712526.1 | SEQ ID NO: 45 | SEQ ID NO: 46 |
| Marssonina brunnea f. sp. | K1WYF0_MARBU | SEQ ID NO: 47 | SEQ ID NO: 48 |
| multigermtubi MB_m1 | | | |
| Mycosphaerella fijiensis | M3B8L0_PSEFD | SEQ ID NO: 49 | SEQ ID NO: 50 |
| Mycosphaerella pini | N1PWT0_DOTSN | SEQ ID NO: 51 | SEQ ID NO: 52 |
| Phytophthora infestans | no reference | — | SEQ ID NO: 395 |
| Phytophthora sojae | no reference | — | SEQ ID NO: 396 |
| Puccinia graminis tritici | XP_003329745.2 | SEQ ID NO: 53 | SEQ ID NO: 54 |
| Puccinia striiformis a | KNE92355.1 | SEQ ID NO: 55 | SEQ ID NO: 56 |
| Puccinia striiformis b | KNE92354.1 | SEQ ID NO: 57 | SEQ ID NO: 58 |
| Puccinia triticina | OAV93070.1 | SEQ ID NO: 59 | SEQ ID NO: 60 |
| Pyrenophora tritici-repentis Pt- | XP_001935903.1 | SEQ ID NO: 61 | SEQ ID NO: 62 |
| 1C-BFP | | | |
| Pyrenophora teres f. teres 0-1 | XP_003303045.1 | SEQ ID NO: 63 | SEQ ID NO: 64 |
| Sclerotinia borealis | W9C6D0_9HELO | SEQ ID NO: 65 | SEQ ID NO: 66 |
| Sclerotinia sclerotiorum 1980 | XP_001587613.1 | SEQ ID NO: 67 | SEQ ID NO: 68 |
| Septoria nodorum | Q0UE33_PHANO | SEQ ID NO: 69 | SEQ ID NO: 70 |
| Septoria tritici | XP_003855355.1 | SEQ ID NO: 71 | SEQ ID NO: 72 |
| Setosphaeria turcica | no reference | SEQ ID NO: 73 | SEQ ID NO: 74 |
| Sphaerulina musiva | M3DBL1_SPHMS | SEQ ID NO: 75 | SEQ ID NO: 76 |
| Ustilago maydis 521 | XP_756449.1 | SEQ ID NO: 77 | SEQ ID NO: 78 |
| Ustilago hordei | CCF54030.1 | SEQ ID NO: 79 | SEQ ID NO: 80 |
| Verticillium dahliae VdLs.17 | XP_009656893.1 | SEQ ID NO: 81 | SEQ ID NO: 82 |
| Zymoseptoria brevis | A0A0F4GCJ5_9PEZI | SEQ ID NO: 83 | SEQ ID NO: 84 |
| Zymoseptoria tritici | A7F332_SCLS1 | SEQ ID NO: 85 | SEQ ID NO: 86 |
| (Mycosphaerella graminicola) | | | |

TABLE 2
The following list indicates the organisms and the accession numbers under which amino
acid and nucleotide sequences of GAA1 are to be found. These amino acid and nucleotide
sequences are disclosed, in the order of appearance, in the sequence listing under SEQ
ID NOs: 87 to 190, 389-390 and 397-398 (odd numbers are nucleotide sequences and subsequent
even numbers are corresponding amino acid sequence, exceptions are SEQ ID NOs: 397 and
398 which are amino acid sequences without corresponding nucleotide sequences).

| | amino acid sequence GAA1 | sequence identifier | sequence identifier |
|---|---|---|---|
| | uniprot or NCBI reference | of nucleotide | of amino acid |
| Fungal pathogen | sequence | sequence | sequence |
| Alternaria solani | kws data | SEQ ID NO: 87 | SEQ ID NO: 88 |
| Bipolaris maydis | N4WYU8_COCH4 | SEQ ID NO: 89 | SEQ ID NO: 90 |
| Bipolaris oryzae | W6Y6U9_COCCA | SEQ ID NO: 91 | SEQ ID NO: 92 |
| Bipolaris sorokiniana | M2T337_COCSN | SEQ ID NO: 93 | SEQ ID NO: 94 |
| Bipolaris victoriae FI3 | W7ECX7_COCVI | SEQ ID NO: 95 | SEQ ID NO: 96 |
| Bipolaris zeicola 26-R-13 | XP_007710354.1 | SEQ ID NO: 97 | SEQ ID NO: 98 |
| Blumeria graminis f. sp. hordei | CCU76546.1 | SEQ ID NO: 99 | SEQ ID NO: 100 |
| DH14 | | | |
| Blumeria graminis f. sp. tritici | EPQ65222.1 | SEQ ID NO: 101 | SEQ ID NO: 102 |
| 96224 | | | |
| Botryosphaeria parva (strain | R1EK29_BOTPV | SEQ ID NO: 103 | SEQ ID NO: 104 |
| UCR-NP2) | | | |
| Botrytis cinerea BcDWl | M7TNH6_BOTF1 | SEQ ID NO: 105 | SEQ ID NO: 106 |
| Cercospora beticola | no reference | SEQ ID NO: 107 | SEQ ID NO: 108 |
| Colletotrichum fioriniae PJ7 | A0A010QKM2_9PEZI | SEQ ID NO: 109 | SEQ ID NO: 110 |
| Colletotrichum graminicola | E3QI05_COLGM | SEQ ID NO: 111 | SEQ ID NO: 112 |
| M1.001] | | | |
| Colletotrichum gloeosporioides | T0M079_COLGC | SEQ ID NO: 113 | SEQ ID NO: 114 |
| Cg-14 | | | |
| Colletotrichum higginsianum | CCF39866.1 | SEQ ID NO: 115 | SEQ ID NO: 116 |
| Colletotrichum orbiculare MAFF | N4VRZ7_COLOR | SEQ ID NO: 117 | SEQ ID NO: 118 |
| 240422 | | | |
| Colletotrichum sublineola | A0A066X1M2_COLSU | SEQ ID NO: 119 | SEQ ID NO: 120 |
| Diaporthe ampelina | A0A0G2HNS3_9PEZI | SEQ ID NO: 121 | SEQ ID NO: 122 |
| Diplodia maydis | no reference | SEQ ID NO: 123 | SEQ ID NO: 124 |
| Diplodia seriata | A0A0G2ED10_9PEZI | SEQ ID NO: 125 | SEQ ID NO: 126 |
| Fusarium fujikuroi IMI 58289 | CCT67544.1 | SEQ ID NO: 127 | SEQ ID NO: 128 |
| Fusarium graminearum PH-1 | I1RUQ4_GIBZE | SEQ ID NO: 129 | SEQ ID NO: 130 |
| Fusarium oxysporum f. sp. cubense | F9FCF7_FUSOF | SEQ ID NO: 131 | SEQ ID NO: 132 |
| race 4 | | | |
| Fusarium pseudograminearum | K3U8J3_FUSPC | SEQ ID NO: 133 | SEQ ID NO: 134 |
| (strain CS3096) | | | |
| Gaeumannomyces graminis var. | J3NV59_GAGT3 | SEQ ID NO: 135 | SEQ ID NO: 136 |
| tritici R3-111a-1 | | | |
| Leptosphaeria maculans JN3 | E5A3J3_LEPMJ | SEQ ID NO: 137 | SEQ ID NO: 138 |
| Macrophomina phaseolina (strain | K2QLD8_MACPH | SEQ ID NO: 139 | SEQ ID NO: 140 |
| MS6) | | | |
| Magnaporthe oryzae 70-15] | G4N7S2_MAGO7 | SEQ ID NO: 141 | SEQ ID NO: 142 |
| Marssonina brunnea f. sp. | K1WPF4_MARBU | SEQ ID NO: 143 | SEQ ID NO: 144 |
| multigermtubi | | | |
| Melampsora larici-populina | F4RWS7_MELLP | SEQ ID NO: 145 | SEQ ID NO: 146 |
| Mycosphaerella fijiensis | M3AL08_PSEFD | SEQ ID NO: 147 | SEQ ID NO: 148 |
| Mycosphaerella pini | N1PCN8_DOTSN | SEQ ID NO: 149 | SEQ ID NO: 150 |
| Nectria haematococca (Fusarium | C7ZLS4_NECH7 | SEQ ID NO: 151 | SEQ ID NO: 152 |
| solani) | | | |
| Phaeosphaeria nodorum | XP_001802233.1 | SEQ ID NO: 155 | SEQ ID NO: 156 |
| Phytophthora infestans T30-4 | XP_002898680.1 | SEQ ID NO: 389 | SEQ ID NO: 390 |
| Phytophthora ramorum | no reference | — | SEQ ID NO: 397 |
| Phytophthora sojae | no reference | — | SEQ ID NO: 398 |
| Puccinia graminis tritici (black | no reference | SEQ ID NO: 157 | SEQ ID NO: 158 |
| rust) | | | |
| Puccinia striiformis (yellow rust) | KNF03903.1 | SEQ ID NO: 159 | SEQ ID NO: 160 |
| Puccinia triticina (brown rust) | kws data | SEQ ID NO: 161 | SEQ ID NO: 162 |
| Pyrenophora teres f. teres (strain | E3S4J2_PYRTT | SEQ ID NO: 163 | SEQ ID NO: 164 |
| 0-1) | | | |
| Pyrenophora tritici-repentis (strain | B2VXP3_PYRTR | SEQ ID NO: 165 | SEQ ID NO: 166 |
| Pt-1C-BFP) | | | |
| Sclerotinia borealis F-4157 | W9CQ82_9HELO | SEQ ID NO: 167 | SEQ ID NO: 168 |
| Sclerotinia sclerotiorum 1980 UF- | A7F0D2_SCLS1 | SEQ ID NO: 169 | SEQ ID NO: 170 |
| 70 | | | |
| Septoria nodorum | Q0U8B2_PHANO | SEQ ID NO: 171 | SEQ ID NO: 172 |
| Septoria tritici/Mycosphaerella | XP_003848386.1 | SEQ ID NO: 153 | SEQ ID NO: 154 |
| graminicola | | | |
| Setosphaeria turcica (strain | no reference | SEQ ID NO: 173 | SEQ ID NO: 174 |
| NY001) | | | |
| Setosphaeria turcica (strain 28A) | no reference | SEQ ID NO: 175 | SEQ ID NO: 176 |
| Sphaerulina musiva (strain | M3CYA3_SPHMS | SEQ ID NO: 177 | SEQ ID NO: 178 |
| SO2202) | | | |
| Ustilago maydis 521 | XP_762352.1 | SEQ ID NO: 179 | SEQ ID NO: 180 |
| Ustilago hordei | CCF48763.1 | SEQ ID NO: 181 | SEQ ID NO: 182 |
| Verticillium dahliae VdLs.17 | G2WVI9_VERDV | SEQ ID NO: 183 | SEQ ID NO: 184 |
| Verticillium alfalfae VaMs.102 | C9SRB1_VERA1 | SEQ ID NO: 185 | SEQ ID NO: 186 |
| Zymoseptoria brevis | A0A0F4GNF8_9PEZI | SEQ ID NO: 187 | SEQ ID NO: 188 |
| Zymoseptoria tritici (strain CBS | no reference | SEQ ID NO: 189 | SEQ ID NO: 190 |
| 115943/IPO323) | | | |

TABLE 3
The following list indicates the organisms and the accession numbers under which amino
acid and nucleotide sequences of GPI8 are to be found. These ammo acid and nucleotide
sequences are disclosed, in the order of appearance, in the sequence listing under SEQ
ID NOs: 191-278, 391-392, and 399 (odd numbers are nucleotide sequences and subsequent
even numbers are corresponding amino acid sequence, exception is SEQ ID NO: 399 which
is an amino acid sequence without corresponding nucleotide sequence).

| | amino acid sequence GPI8 | sequence identifier | sequence identifier |
|---|---|---|---|
| | uniprot or NCBI reference | of nucleotide | of amino acid |
| Fungal pathogen | sequence | sequence | sequence |
| Alternaria solani | no reference | SEQ ID NO: 191 | SEQ ID NO: 192 |
| Blumeria graminis f. sp. tritici | EPQ66664.1 | SEQ ID NO: 193 | SEQ ID NO: 194 |
| 96224 | | | |
| Bipolaris maydis | EMD93277.1 | SEQ ID NO: 195 | SEQ ID NO: 196 |
| Bipolaris sorokiniana | XP_007695404.1 | SEQ ID NO: 197 | SEQ ID NO: 198 |
| Bipolaris oryzae | W6ZCQ9_COCMI | SEQ ID NO: 199 | SEQ ID NO: 200 |
| Bipolaris victoriae FI3 | W7ELV8_COCVI | SEQ ID NO: 201 | SEQ ID NO: 202 |
| Bipolaris zeicola 26-R-13 | W6Y7X6_COCCA | SEQ ID NO: 203 | SEQ ID NO: 204 |
| Botryosphaeria parva | R1G6E1_BOTPV | SEQ ID NO: 205 | SEQ ID NO: 206 |
| Botrytis cinerea | EMR90910.1 | SEQ ID NO: 207 | SEQ ID NO: 208 |
| Cercospora beticola | no reference | SEQ ID NO: 209 | SEQ ID NO: 210 |
| Claviceps purpurea | CCE31202.1 | SEQ ID NO: 211 | SEQ ID NO: 212 |
| Colletotrichum gloeosporioides | ELA35472.1 | SEQ ID NO: 213 | SEQ ID NO: 214 |
| Colletotrichum graminicola | EFQ31045.1 | SEQ ID NO: 215 | SEQ ID NO: 216 |
| M1.001 | | | |
| Colletotrichum higginsianum | CCF33935.1 | SEQ ID NO: 217 | SEQ ID NO: 218 |
| Colletotrichum orbiculare | ENH84689.1 | SEQ ID NO: 219 | SEQ ID NO: 220 |
| Colletotrichum sublineola | A0A066X3R0_COLSU | SEQ ID NO: 221 | SEQ ID NO: 222 |
| Diplodia seriata. | A0A0G2EU52_9PEZI | SEQ ID NO: 223 | SEQ ID NO: 224 |
| Fusarium fujikuroi | CCT64293.1 | SEQ ID NO: 225 | SEQ ID NO: 226 |
| Fusarium graminearum | XP_389811.1 | SEQ ID NO: 227 | SEQ ID NO: 228 |
| Fusarium oxysporum f. sp. cubense | ENH73817.1 | SEQ ID NO: 229 | SEQ ID NO: 230 |
| Fusarium pseudograminearum | K3VI57_FUSPC | SEQ ID NO: 231 | SEQ ID NO: 232 |
| Gaeumannomyces graminis var. | XP_009218379.1 | SEQ ID NO: 233 | SEQ ID NO: 234 |
| tritici | | | |
| Leptosphaeria maculans | XP_003837876.1 | SEQ ID NO: 235 | SEQ ID NO: 236 |
| Macrophomina phaseolina | K2SFV8_MACPH | SEQ ID NO: 237 | SEQ ID NO: 238 |
| Magnaporthe oryzae | XP_003713394.1 | SEQ ID NO: 239 | SEQ ID NO: 240 |
| Marssonina brunnea f. sp. | K1XD14_MARBU | SEQ ID NO: 241 | SEQ ID NO: 242 |
| multigermtubi | | | |
| Melampsora larici-populina | F4RLF1_MELLP | SEQ ID NO: 243 | SEQ ID NO: 244 |
| Microbotryum lychnidis-dioicae | U5HEY6_USTV1 | SEQ ID NO: 245 | SEQ ID NO: 246 |
| Mycosphaerella fijiensis | M3B0T1_PSEFD | SEQ ID NO: 247 | SEQ ID NO: 248 |
| Nectria haematococca | C7Z4S9_NECH7 | SEQ ID NO: 249 | SEQ ID NO: 250 |
| Phytophthora infestans | no reference | SEQ ID NO: 391 | SEQ ID NO: 392 |
| Phytophthora sojae | no reference | — | SEQ ID NO: 399 |
| Puccinia graminis f. sp. tritici | E3JXE4_PUCGT | SEQ ID NO: 251 | SEQ ID NO: 252 |
| Puccinia striiformis | no reference | SEQ ID NO: 253 | SEQ ID NO: 254 |
| Puccinia triticina | no reference | SEQ ID NO: 255 | SEQ ID NO: 256 |
| Pyrenophora teres | XP_003296516.1 | SEQ ID NO: 257 | SEQ ID NO: 258 |
| Pyrenophora tritici-repentis | XP_001932828.1 | SEQ ID NO: 259 | SEQ ID NO: 260 |
| Sclerotinia borealis | W9C4T5_9HELO | SEQ ID NO: 261 | SEQ ID NO: 262 |
| Septoria nodorum | Q0UPJ4_PHANO | SEQ ID NO: 263 | SEQ ID NO: 264 |
| Setosphaeria turcica (strain 28A) | no reference | SEQ ID NO: 265 | SEQ ID NO: 266 |
| Sphaerulina musiva | M3CJM0_SPHMS | SEQ ID NO: 267 | SEQ ID NO: 268 |
| Ustilago hordei | CCF49395.1 | SEQ ID NO: 269 | SEQ ID NO: 270 |
| Ustilago maydis | XP_761856.1 | SEQ ID NO: 271 | SEQ ID NO: 272 |
| Verticillium dahliae | XP_009650278.1 | SEQ ID NO: 273 | SEQ ID NO: 274 |
| Zymoseptoria brevis | A0A0F4GM06_9PEZI | SEQ ID NO: 275 | SEQ ID NO: 276 |
| Zymoseptoria tritici | KJX97235.1 | SEQ ID NO: 277 | SEQ ID NO: 278 |
| (Mycosphaerella graminicola) | | | |

TABLE 4
The following list indicates the organisms and the accession numbers under which amino acid and nucleotide
sequences of GWT1 are to be found. These amino acid and nucleotide sequences are disclosed, in the
order of appearance, in the sequence listing under SEQ ID NOs: 279 to 350, and 400 (odd numbers are
nucleotide sequences and subsequent even numbers are corresponding amino acid sequence, exception
is SEQ ID NO: 400 which is an amino acid sequence without corresponding nucleotide sequence).

| | amino acid sequence GWT1 | sequence identifier | sequence identifier |
|---|---|---|---|
| | uniprot or NCBI reference | of nucleotide | of amino acid |
| Fungal pathogen | sequence | sequence | sequence |
| Alternaria solani | no reference | SEQ ID NO: 279 | SEQ ID NO: 280 |
| Bipolaris maydis | N4X697_COCH4 | SEQ ID NO: 285 | SEQ ID NO: 286 |
| Bipolaris oryzae ATCC 44560 | W6ZVI8_COCMI | SEQ ID NO: 287 | SEQ ID NO: 288 |
| Bipolaris victoriae FI3 | W7EBJ8_COCVI | SEQ ID NO: 289 | SEQ ID NO: 290 |
| Bipolaris zeicola 26-R-13 | W6XXE1_COCCA | SEQ ID NO: 291 | SEQ ID NO: 292 |
| Blumeria graminis f. sp. tritici. | E7DZJ9_BLUGR | SEQ ID NO: 293 | SEQ ID NO: 294 |
| Botryotinia fuckeliana (Botrytis | G2Y8N6_BOTF4 | SEQ ID NO: 295 | SEQ ID NO: 296 |
| cinerea) | | | |
| Cercospora beticola | no reference | SEQ ID NO: 281 | SEQ ID NO: 282 |
| Cochliobolus sativus (Bipolaris | M2SB78_COCSN | SEQ ID NO: 297 | SEQ ID NO: 298 |
| sorokiniana) | | | |
| Colletotrichum fioriniae PJ7 | A0A010QVS2_9PEZI | SEQ ID NO: 299 | SEQ ID NO: 300 |
| Colletotrichum graminicola | E3Q3K0_COLGM | SEQ ID NO: 301 | SEQ ID NO: 302 |
| Colletotrichum higginsianum | H1VZH3_COLHI | SEQ ID NO: 303 | SEQ ID NO: 304 |
| Diplodia maydis | no reference | SEQ ID NO: 283 | SEQ ID NO: 284 |
| Gaeumannomyces graminis var. | J3NRY1_GAGT3 | SEQ ID NO: 305 | SEQ ID NO: 306 |
| tritici | | | |
| Fusarium graminearum | GWT1_GIBZE | SEQ ID NO: 307 | SEQ ID NO: 308 |
| Fusarium pseudograminearum | K3V2I8_FUSPC | SEQ ID NO: 309 | SEQ ID NO: 310 |
| Fusarium oxysporum | F9FXK6_FUSOF | SEQ ID NO: 311 | SEQ ID NO: 312 |
| Fusarium verticillioides | W7LLV3_GIBM7 | SEQ ID NO: 313 | SEQ ID NO: 314 |
| Leptosphaeria maculans | E5A261_LEPMJ | SEQ ID NO: 315 | SEQ ID NO: 316 |
| Magnaporthe oryzae | G4MWY7_MAGO7 | SEQ ID NO: 317 | SEQ ID NO: 318 |
| Melampsora larici-populina | F4RV06_MELLP | SEQ ID NO: 319 | SEQ ID NO: 320 |
| Mycosphaerella fijiensis | M2Z0D7_PSEFD | SEQ ID NO: 321 | SEQ ID NO: 322 |
| Mycosphaerella pini | N1PRQ8_DOTSN | SEQ ID NO: 323 | SEQ ID NO: 324 |
| Nectria haematococca (Fusarium | C7YII9_NECH7 | SEQ ID NO: 325 | SEQ ID NO: 326 |
| solani spp. pisi) | | | |
| Phytophthora infestans | no reference | SEQ ID NO: 327 | SEQ ID NO: 328 |
| Phytophthora ramorum | no reference | — | SEQ ID NO: 400 |
| Phytophthora sojae | no reference | SEQ ID NO: 329 | SEQ ID NO: 330 |
| Puccinia graminis f. sp. tritici | E3K5G3_PUCGT | SEQ ID NO: 331 | SEQ ID NO: 332 |
| Pyrenophora teres f. teres | E3S5G3_PYRTT | SEQ ID NO: 333 | SEQ ID NO: 334 |
| Pyrenophora tritici-repentis | B2W5A6_PYRTR | SEQ ID NO: 335 | SEQ ID NO: 336 |
| Sclerotinia sclerotiorum | XP_001587300.1 | SEQ ID NO: 337 | SEQ ID NO: 338 |
| Septoria nodorum | Q0U1Z7_PHANO | SEQ ID NO: 339 | SEQ ID NO: 340 |
| Setosphaeria turcica (strain 28A) | R0J317_SETT2 | SEQ ID NO: 341 | SEQ ID NO: 342 |
| Sphaerulina musiva | M3B4C9_SPHMS | SEQ ID NO: 343 | SEQ ID NO: 344 |
| Sporisorium reilianum | E6ZZ44_SPORE | SEQ ID NO: 345 | SEQ ID NO: 346 |
| Zymoseptoria brevis | A0A0F4GYQ8_9PEZI | SEQ ID NO: 347 | SEQ ID NO: 348 |
| Zymoseptoria tritici | no reference | SEQ ID NO: 349 | SEQ ID NO: 350 |

TABLE 5
The following list indicates the organisms and the accession numbers under which
amino acid and nucleotide sequences of GPI1, GPI2, GPI3, GPI15, ERI1, GPI19, GPI14,
PBN1, GPI18, MCD4, GPI10, SMP3, GPI13, GPI11, GPI7, GPI16, GPI17, GAB1, and BST1
are to be found. These amino acid and nucleotide sequences are disclosed, in the
order of appearance, in the sequence listing under SEQ ID NOs: 351 to 388.

| | | | sequence identifier | sequence identifier |
|---|---|---|---|---|
| | | Genbank or NCBI | of nucleotide | of amino acid |
| Fungal pathogen | Gene | reference sequence | sequence | sequence |
| Colletotrichum graminicola | GPI1 | EFQ27535.1 | SEQ ID NO: 351 | SEQ ID NO: 352 |
| Bipolaris maydis | GPI2 | XP_014083615.1 | SEQ ID NO: 353 | SEQ ID NO: 354 |
| Magnaporthe oryzae | GPI3 | XP_003719931.1 | SEQ ID NO: 355 | SEQ ID NO: 356 |
| Leptosphaeria maculans | GPI15 | XP_003844705.1 | SEQ ID NO: 357 | SEQ ID NO: 358 |
| Saccharomyces cerevisiae | ERI1 | NP_690846.1 | SEQ ID NO: 359 | SEQ ID NO: 360 |
| Pyrenophora tritici-repentis | GPI19 | XP_001930950.1 | SEQ ID NO: 361 | SEQ ID NO: 362 |
| Setosphaeria turcica | GPI14 | XP_008030968.1 | SEQ ID NO: 363 | SEQ ID NO: 364 |
| Colletotrichum graminicola | PBN1 | XP_008089048.1 | SEQ ID NO: 365 | SEQ ID NO: 366 |
| Leptosphaeria maculans | GPI18 | XP_003837812.1 | SEQ ID NO: 367 | SEQ ID NO: 368 |
| Zymoseptoria tritici | MCD4 | XP_003852356.1 | SEQ ID NO: 369 | SEQ ID NO: 370 |
| Fusarium graminearum | GPI10 | Q4IB63.1 | SEQ ID NO: 371 | SEQ ID NO: 372 |
| Bipolaris maydis | SMP3 | XP_014076431.1 | SEQ ID NO: 373 | SEQ ID NO: 374 |
| Fusarium oxysporum f. sp. | GPI13 | EMT70116.1 | SEQ ID NO: 375 | SEQ ID NO: 376 |
| cubense | | | | |
| Puccinia graminis f. sp. tritici | GPI11 | XP_003322129.2 | SEQ ID NO: 377 | SEQ ID NO: 378 |
| Colletotrichum gloeosporioides | GPI7 | XP_007279636.1 | SEQ ID NO: 379 | SEQ ID NO: 380 |
| Rhizoctonia solani | GPI16 | EUC66655.1 | SEQ ID NO: 381 | SEQ ID NO: 382 |
| Rhizoctonia solani | GPI17 | ELU43284.1 | SEQ ID NO: 383 | SEQ ID NO: 384 |
| Phytophthora parasitica | GAB1 | ETP33465.1 | SEQ ID NO: 385 | SEQ ID NO: 386 |
| Puccinia striiformis f. sp. tritici | BST1 | KNE97721.1 | SEQ ID NO: 387 | SEQ ID NO: 388 |

[0153] Especially preferred, the inhibitory nucleic acid molecule capable of inhibiting the expression of (a) gene(s) involved in the GPI anchor biosynthesis pathway in a fungus inhibits the expression of the gene(s) of the following species: Alternaria solani, Blumeria graminis, Botryotinia fuckeliana, Cercospora beticola, Claviceps purpurea, Colletotrichum graminicola, Colletotrichum higginsianum, Colletotrichum orbiculare, Fusarium fujikuroi, Fusarium solani, Fusarium oxysporum, Gaeumannomyces graminis, Magnaporthe oryzae, Puccinia graminis, Puccinia triticiana, Pyrenophora tritici-repentis, Phaeosphaeria nodorum, Sclerotinia sclerotiorum, Ustilago maydis, Verticillium alfalfae, and Verticillium dahlia.

Selection of GPI12, GAA1 and GPI8 of Colletotrichum graminicola

[0154] The complex GPI anchor biosynthesis pathway is closely associated with the endoplasmic reticulum (ER), with the first steps being catalyzed on the cytoplasmic surface of the ER membrane and the latter, leading to transfer of the final GPI anchor to the C-terminus of GPI-anchored proteins, occurring in the ER lumen. In order to investigate the importance of GPI biosynthesis in the infection process of a plant pathogenic fungus we decided to disrupt this complex pathway of the maize pathogen C. graminicola at two distinct early and late steps and attempted to delete the second gene of this pathway, GPI12 (gene annotation number EFQ25317.1 (SEQ ID NO: 21); (http://www.broadinstitute.org/annotation/genome/colletotrichum_group/MultiHome.html; O'Connell, 2012. Lifestyle transitions in plant pathogenic Colletotrichum fungi deciphered by genome and transcriptome analyses. Nat Genet. 2012 September; 44(9):1060-5), encoding an N-acetylglucosaminylphosphatidylinositol deacetylase (SEQ ID NO: 22), as well as the GAA1 (E3QI05_COLGM; SEQ ID NO: 111) and GPI8 (EFQ31045.1; SEQ ID NO: 215) genes encoding two indispensable sub-units of the GPI transamidase complex catalyzing the final GPI anchor transfer to proteins (SEQ ID NOs: 112 and 216). These genes are single-copy genes in C. graminicola, and the derived proteins share significant similarity with the corresponding proteins of other filamentous ascomycota, and the similarity is particularly true across proteins of different Colletotrichum species (FIG. 2). As expected, sequences of yeasts and of basidiomycota (FIG. 2) are not as closely related to C. graminicola GPI12, GAA1 and GPI8. For example, the amino acid identity of C. graminicola GPI12, GAA1 and GPI8 with the corresponding C. higginsianum proteins is 82, 92, and 94%. The identity with the Magnaporthe oryzae proteins is 61, 65, and 81%, the identity with the S. cerevisiae proteins is 30, 31, and 54%, respectively.

[0155] In order to delete GPI12, GAA1, and GPI8, we performed targeted gene deletion experiments, using the hygromycin resistance gene of Escherichia coli (Punt P. J. et al., 1987, Transformation of Aspergillus based on the hygromycin B resistance marker from Escherichia coli. Gene. 56(1):117-24), flanked by approx 1 Kbp 5′- and 3′-flanking DNA of the gene to be deleted. Among 200 transformants screened for each of the three single-copy genes, no transformants carrying homologous integration of the respective deletion cassette was found, strongly suggesting that GPI12, GAA1 and GPI8 are involved genes in C. graminicola. Therefore we employed a RNAi strategy previously established to characterize the cell wall β-1,3-glucan biosynthesis gene GLS1 (Oliveira-Garcia, 2013) (FIG. 3). The sense and corresponding antisense sequences used in RNAi constructs were 493, 560, and 690 bp for GPI12, GAA1, and GPI8, respectively, and the strong constitutive trpC promoter of Aspergillus nidulans (Yelton, 1984) was used to control transcription of the RNAi constructs (FIG. 3A) (Oliveira-Garcia, 2013). Transformants harbored one or two copies of the GPI12-, GAA1- or GPI8-RNAi construct (FIG. 3B). Importantly, all transformants tested showed strongly decreases of transcript abundances, ranging from approximately 50-90%, as indicated by RT-qPCR analyses (FIG. 3C).

### Reduction of GPI12, GAA1 and GPI8 Transcript Levels Impair Vegetative Fungal Growth

[0156] In order to analyze the role of GPI12, GAA1 and GPI8 in vegetative development, growth assays were performed with three independent RNAi strains on oat meal agar (OMA) and hyphal morphology was microscopically investigated (FIG. 4A). Interestingly, even the strain with the weakest reduction of transcript abundance (GPI12-, GAA1- and GPI8-RNAi strain 1), showing between 40 and 50%, had a growth reduction by 71, 68 and 64%, respectively (compare FIG. 3C and FIG. 4A). The strains with more pronounced reduction of transcript abundance, i.e. RNAi strains 2 and 3, showed negligible growth, clearly indicating the importance of GPI12, GAA1 and GPI8 for hyphal growth. Interestingly, in contrast to vegetative hyphae of the WT strain, which developed long filaments, all RNAi strains tested formed hyperpigmented dark swellings (FIG. 4B). Only occasionally very short filaments growing out of a swelling were observed (FIG. 4B, GPI8-RNAi), suggesting that cell walls of filaments were not rigid enough to maintain the hyphal shape and formed swellings when turgor pressure increased. Occasionally large swellings containing intrahyphal hyphae were seen, but hyphae formed within other hyphae were also misshapen (FIG. 4B, GAA1-RNAi, asterisk). Interestingly, hyperpigmented swellings were also seen in GLS1-RNAi strains. This striking similarity of the phenotypes strongly suggests that GPI anchors play an involved role in β-glucan-dependent cell wall structure.

### Reduction of GPI12, GAA1 and GPI8 Transcript Levels Impair Asexual Spore Formation

[0157] Formation of asexual spores is a critical step in fungal propagation. In Aspergillus nidulans RNA sequencing revealed altered regulation of approx. 20% of all predicted genes at the shift from vegetative hyphal growth to conidiation, corresponding to more than 2,000 genes. Indeed, previous studies have shown that mutations affecting high-affinity iron uptake caused reduce rates of sporulation and, moreover, affect the conidial shape (Oliveira-Garcia, 2013). As sporulation defects were significant in mutants affecting cell wall rigidity, and as GPI anchored proteins play important roles in cell walls, we studied formation of conidia in GPI12-, GAA1- and GPI8-RNAi strains. Conidiation of GPI12-, GAA1- and GPI8-RNAi strains on OMA required osmotic stabilization (Oliveira-Garcia, 2013). On non-stabilized medium, only the WT strain conidiated (FIG. 5B). On OMA complemented with 0.5 M KCl or 1 M sorbitol, conidia were produced by GPI12-, GAA1- and GPI8-RNAi strains, but the rate of conidiation was significantly lower than that of the WT strain. Importantly, RNAi strains showing strongly reduced transcript abundance, i.e. GPI12-RNAi strains 4 and 5, GAA1-RNAi strains 5, 6 and 7, and GPI8-RNAi strains 4, 5 and 6 failed to sporulate completely (compare FIGS. 3C and 5B). Apparently, sporulation rates and transcript abundance correlate. Quantification of transcript abundance and rates of conidiation suggests that suppression of transcript abundance to more than 90% in the case of N-acetylglucosaminylphosphatidylinositol deacetylase gene GPI12 and 70% in the case of the GPI transamidase complex genes GAA1 and GPI8 is required for elimination of asexual sporulation, even when media are osmotically stabilized.

[0158] On oat meal agar supplemented with 1 M sorbitol the WT strain formed falcate conidia (FIG. 5A, WT). In comparison, the GPI12-, GAA1- and GPI8-RNAi strain formed shorter spores with increased diameters, leading to an oval to bean-like phenotype (FIG. 5A, GPI12-, GAA1- and GPI8-RNAi, compare with WT). This bean-like swollen phenotype may be well explained by reduced cell wall rigidity of conidia formed by GPI12-, GAA1- and GPI8-RNAi strains.

### Reduction of GPI12, GAA1 and GPI8 Transcript Levels Impair Formation of Fungal Infection Structures

[0159] As GPI anchors are thought to play a role in cross-connecting cell wall β-glucan polymers and thus presumably also in cell wall rigidity, we investigated rates of appressorium differentiation and appressorial integrity in two independent GPI12-, GAA1- and GPI8-RNAi strains (FIG. 5). In these experiments we used strains with moderately reduced transcript abundance, corresponding to approx. 40 to 60%. In all RNAi strains reduced transcript abundance correlated with reduced germination rates, and while the vast majority of the germ tubes formed by the WT strain differentiated an appressorium, appressorium formation rates were severely reduced in GPI12-, GAA1- and GPI8-RNAi strains (FIG. 5D). Appressoria of these strains, like those formed by the WT, were strongly melanized (FIG. 5C, arrowheads). Importantly, infection cells of all RNAi strains, when allowed to form on artificial polypropylene surfaces, exploded spontaneously at high frequency (FIG. 6C, arrows). Again, these observations highlight the importance of GPI anchor biosynthesis in cell wall rigidity and infection cell functionality.

### Reduction of GPI12, GAA1 and GPI8 Transcript Levels Results in Reduced Infection Rates

[0160] In order to analyze pathogenicity or virulence defects resulting from appressorial penetration defects/failure, we inoculated conidia of GPI12-, GAA1- and GPI8-RNAi strains onto intact maize leaf surfaces. As appressoria of these strains exploded on artificial surfaces, we anticipated that the GPI12-, GAA1- and GPI8-RNAi strains would have problems to invade the host tissue. Indeed, independent RNAi strains were unable to invade the plant and to cause anthracnose disease symptoms. The WT strain had full penetration competence and severe anthracnose disease symptoms were seen 5 days after inoculation (FIG. 6A, non-wounded). On wounded leaves, minor necrotization of the tissue was observed at the margins of the wounds, but as compared with the disease symptoms caused by the WT strain, the symptoms caused by the mutants were minor (FIG. 6A, wounded). Quantification of fungal DNA in the inoculated tissue by qPCR fully supported the macroscopical observations and clearly indicated that the RNAi strains were unable to invade intact plants (FIG. 6B). Furthermore, qPCR analyses showed that reduction of transcript abundance of all three genes investigated correlated with the ability of C. graminicola mutants to develop on wounded leaves and thus with virulence (compare FIGS. 3C and 7B). Microscopy showed that the WT strain inoculated onto wounded leaves extensively colonized its host leave and formed thin, fast growing secondary hyphae indicative of a necrotrophic lifestyle (FIG. 6C, WT, arrowhead), and these hyphae frequently breached plant cell walls (FIG. 6C, WT, arrow). In contrast, all RNAi strains tested showed severely distorted infectious hyphae, exhibiting large swellings (FIG. 6C, RNAi strains, asterisks) connected by short stretches of non-swollen hyphae ((FIG. 6C, RNAi strains, arrowhead). Randomly occurring swellings suggest that the cell wall rigidity of all RNAi strains is insufficient to maintain the hyphal shape in pathogenic hyphae.

### Enhanced Early Blight Resistance of HIGS_{GPI8} Potato Lines

[0161] In order to test the suitability of GPI anchor biosynthesis genes for the improvement of fungal resistance of crops a fragment of the GPI8 gene of the potato pathogen Alternaria solani was selected. Based on homology search with the yeast GPI8 gene the GPI8 gene was identified in a proprietary KWS data bank of the Alternaria solani genomic sequence.

[0162] The GPI8 fragment was used for the construction of an RNAi-hairpin construct pRNAi-HIGS-AsGpi8 (FIG. 8). The HindIII-HindIII fragment of this construct was cloned into the binary vector p95N which was transformed by Agrobacterium timefaciens mediated transformation into the potato genotype Hermes. As a control an RNAi-hairpin construct against the GFP protein was generated and also transformed into potato.

[0163] The transgenic HIGS_{GPI8} potato lines were in-vitro multiplied and tested under near-field like conditions for A. solani (early blight) resistance. The line PR-H-36-T-017 showed enhanced early blight resistance compared to the non-transgenic Hermes and the HIGS GFP potato line. The transcriptional silencing activity of the HIGS_{GPI8} potato lines were determined by biolistic transfer of a reporter gene construct which contains a fusion between the HIGS target gene and the luciferase gene. The transcriptional silencing activity of line PR-H-36-T-017 was the highest in comparison to other HIGS_{GPI8} potato lines (FIG. 9). This result showed that the silencing activity correlates with the early blight resistance and might be used to screen for plants with enhanced fungal resistance.

[0164] Under near field conditions at field trials in Germany an enhanced early blight resistance of the HIGS potato line PR-H-36-T-017 has been shown (FIG. 14). The transformation genotype Hermes and the transgenic control, which was transformed with an RNAi construct against the green fluorescence protein (GFP) showed a destruction of the plants by 80 and 87%, respectively. The HIGS_{GPI8} lines PR-H-36-T-002 and PR-H-36-T-017 showed only a plant damage of 70 and 58%.

The GWT1 Gene is Important for the Vegetative Growth of Fusarium graminearum as Shown by the Chemical Induction of a RNAi_{GWT1}

[0165] The doxycycline (Dox) inducible tetO promoter was applied to analyze the relevance of the GWT1 gene for the vegetative growth of Fusarium graminearum (FIG. 7A). An RNAi_{GWT1} construct under the control of the tetO promoter was transformed into F. graminearum. In the absence of Dox the growth of the transformants 1280_13, 1280_17 and 1280_5 was identical to the growth of the wild type PH-1. In the presence of Dox the transformants 1280_13, 1280_17 and 1280_5 showed growth retardation (FIG. 7B) which showed that the reduction of GWT1 expression impairs the fungal growth.

### Enhanced Fusarium Head Scab Resistance of HIGS_{GWT1} Wheat Lines

[0166] In order to show the suitability of another GPI anchor protein biosynthesis gene for the improvement of Fusarium resistance of wheat a fragment of the GWT1 gene of the wheat and corn pathogen Fusarium graminearum was selected. Based on homology search the GWT1 gene was identified in a public data bank of Fusarium graminearum genomic sequences. The GWT1 gene fragment was used for the construction of a double promoter RNAi-construct which was transformed by Agrobacterium mediated transformation into the wheat genotype Taifun. In the double promoter construct the HIGS target gene is flanked by two 35S promotors in a forward and a reverse orientation which will result in the biosynthesis of a sense and an antisense transcript (FIG. 10). Sense and antisense transcript will hybridize to a double stranded RNA molecule which is the target for the siRNA generating enzymes.

[0167] Homozygous and heterozygous plants of the segregating T1 generation were identified by PCR and the transgenic plants were tested for Fusarium graminearum resistance in the greenhouse. The heads of the whole plants were inoculated with Fusarium spores (25.000 spores/ml). The spread of disease was rated six times at an interval of 2-4 days, using a percentage scale of 0-100 with increments of 1, where 0 indicates a healthy head and 100 indicates a completely bleached head.

[0168] The six disease score values were used for the calculation of an “area under disease progress curve” (AUDPC). The HIGS_{GWT1} wheat line WA336-T-018 showed reduced visual Fusarium head scab symptoms in comparison to the Taifun genotype as shown by a reduced AUDPC value (FIG. 11). The determination of the mycotoxin DON by ELISA revealed also a reduction of the toxin in the heads of the HIGS line. The determination of the fungal biomass in the infected heads by qPCR revealed a 40% reduction of Fusarium biomass in the heads of the HIGS_{GWT1} wheat line WA336-T-018 in comparison to Taifun (FIG. 12). In summary the HIGS_{GWT1} wheat line showed a reduction of visual symptoms, fungal biomass and DON mycotoxin comparable or even better as to the cultivar Aurum. Aurum was the wheat cultivar with the best Fusarium resistance available in Germany. Since Aurum has some negative agronomical properties (yellow flour), the cultivation is very limited.

[0169] A field trial with a random plot design was performed at two locations in Minnesota (USA) to determine the fungal resistance under field conditions. Plots of wheat plants were spray inoculated with a mixture of 8 Fusarium isolates from the USA and a visual disease scoring was done (1-9, 1=healthy, 9=100% bleached heads). The HIGS_{GWT1} wheat line WA336-T-018 showed a disease score of 2.1 in comparison to a value of 2.9 for the genotype Taifun and the mean of transgenic controls in the Taifun background. Conventional reference lines from the USA (Briggs, Steele, Glenn) and Germany (Scirocco, Tybalt) were included into the trials. The transgenic HIGS line performed superior compared to the reference lines and showed especially a significant higher resistance as Glenn, which is recommended to the US farmers as partial Fusarium tolerant variety (FIG. 13).

[0170] Taken together, the data shown here suggest that GPI anchor biosynthesis is required for vegetative hyphal growth, conidiation, differentiation of functional appressoria, and development of invasive pathogenic hyphae.

The application's sequence listing, which the Patent Office published only in electronic form, follows.

SEQUENCE LISTING (420 sequences)

SEQ ID NO: 1 - DNA, 873 bp, Blumeria graminis
  misc_feature: Blumeria graminis f. sp. tritici
atgacgacatggattctcacaattctcctaacagtcgccatcagcgtatcaatttggctctacaacgacaataccaaatgcgcgaaacttccaaccctgcgcaaaaagcgcatctgtctactaatcgcccacccagatgacgaagccatgttcttttcgccaacgttactcgccctcacacaaccatctcttggtaaccatgtcaagattctatgtttaagtagtggtgatagtgaaggactcggcgccacgaggaaaaaagaaatagcaaagagcggtatagcactcggattaaggacggaagatgacgtatttgtgattgaaagcgcggaatttccggattccatcaaaatccattggaatcaaaagagtgttgtgaaacttctcttctcggcttttgcatctcacctcgagacatctgacggtacttctaatcctgtatctaccgccacgatagatgttctcatcacgtttgactcgggtggaatctctggacatccaaatcatatttccctcttccatggtgcaagaaagtttataactttgctatctcaatttgaactgcagaatcccgtacacctttacaccctgacttcagtgtcatttctacgaaaatatacagcatttctagatgctattgtgagcatcatcatgatgaaattctctgggcaaaattttggaaaaactacaagcaaacttttatttctcaacaagccaactaatataatacgtgcgcagagagccatgagtagctgccataaaagccaaatgaagtggtatagatggggatggataatatggtctaggtatatgatagttaatgacctgcgtttggaacttcacacggacaactgtaatgaagggtcacactga

SEQ ID NO: 2 - protein, 290 aa, Blumeria graminis
MTTWILTILLTVAISVSIWLYNDNTKCAKLPTLRKKRICLLIAHPDDEAMFFSPTLLALTQPSLGNHVKILCLSSGDSEGLGATRKKEIAKSGIALGLRTEDDVFVIESAEFPDSIKIHWNQKSVVKLLFSAFASHLETSDGTSNPVSTATIDVLITFDSGGISGHPNHISLFHGARKFITLLSQFELQNPVHLYTLTSVSFLRKYTAFLDAIVSIIMMKFSGQNFGKTTSKLLFLNKPTNIIRAQRAMSSCHKSQMKWYRWGWIIWSRYMIVNDLRLELHTDNCNEGSH

SEQ ID NO: 3 - DNA, 873 bp, Blumeria graminis
  misc_feature: Blumeria graminis f. sp. hordei DH14
atgacgatatggattctcacaattctcctattcgtcgccatcagcgtatcaatttggctctacaacgacagtactaaatgcgcgaaacttccaagcctgcgcaaaaagcgcatttgtctactaattgcccacccagatgacgaagccatgttctttgcgccaaccttgctcgccctcacacaaccatctctcggtaaccatgtcaagattctatgtttaagcagtggcgatagtgaaggactcggcgccacgaggaaaaaggaaatagcaaagagcggtatagcactcggattgcggacggaagatgacgtatttgtgattgaaagcgcggaatttccggattccatcaaaacccgttggaatcaaaaaagtatcgtgaaacttctcttttcggcttttgcatctcacctcgagacatctgaccgtacttctaatcctgcatctaccgccacgatagatgttctcatcacttttgactcgggtggaatttctgggcacccaaatcatatttccctcttccatggtgcaagagagtttatatctttgctatctcaatttgaactacagaatcccgtacacctctacaccctgacttcggtgtcatttctacgaaaatatacagcctttttagatgctattgtgagcatcacaatgatgaaattctctgggcagaatgttggaaaaactataagcaactttttgtttctcaacaagccaactaatatcttacgtgcgcagagagccatgagtaattgccataaaagccaaatgaagtggtatagatggggatggattatatggtctaggtatatgatagttaatgacctgcgattggaactccacacggacaactgtaatgaagggtcacactga

SEQ ID NO: 4 - protein, 290 aa, Blumeria graminis
MTIWILTILLFVAISVSIWLYNDSTKCAKLPSLRKKRICLLIAHPDDEAMFFAPTLLALTQPSLGNHVKILCLSSGDSEGLGATRKKEIAKSGIALGLRTEDDVFVIESAEFPDSIKTRWNQKSIVKLLFSAFASHLETSDRTSNPASTATIDVLITFDSGGISGHPNHISLFHGAREFISLLSQFELQNPVHLYTLTSVSFLRKYTAFLDAIVSITMMKFSGQNVGKTISNFLFLNKPTNILRAQRAMSNCHKSQMKWYRWGWIIWSRYMIVNDLRLELHTDNCNEGSH

SEQ ID NO: 5 - DNA, 840 bp, Bipolaris maydis
atgaattggaccgtctgggcatcggtgcccctcctcatcttcgccttctggatgtacaccagcacgctcagtacatccttccccaccctgcataacaaacgcattttgctcctcatagcgcatccagatgacgaggccatgttctttgccccggctctgcttgcattgacgcgtccagaacatggaaatcacgtcaagattctgtgtttgagcagtggcgacgccgacgggttgggccacgtgcgcaagaaagagctagtcaagagcgggctgcaattgggcattggaagcgaagatgatattcttgtcgtcgaggacaagaacttccccgactccatgaccgtaacatggcaccctcgtctaatctccaacctgcttaccacggcctttgccccagacatgtcttcggtttcttccagggaagcaccgcaggccaccatcgacgccatcgtcacatttgacgcacacggcatctccggccaccccaatcacaaatcgctccatgccggagcccacagcttcctcaaggcgctcatgcaccgtcacagtggctgggagtgtcccgtcaagctgtacacgcttacgaccattccaatctttcgcaaatacctcggcttgttcgacgcccctgctaccataattggcgcaatgctgcaaaagaagcagctgggggggttcccaactccgctcctgtttgccagctcaccgatcggttacaggacggctcagaaggccatgactactgcgcatgagagccagatgcgctggttccgttggggctggattaccctatcacgctacatggtgttgaacgacctgaaactcgaaaagactctctaa

SEQ ID NO: 6 - protein, 279 aa, Bipolaris maydis
MNWTVWASVPLLIFAFWMYTSTLSTSFPTLHNKRILLLIAHPDDEAMFFAPALLALTRPEHGNHVKILCLSSGDADGLGHVRKKELVKSGLQLGIGSEDDILVVEDKNFPDSMTVTWHPRLISNLLTTAFAPDMSSVSSREAPQATIDAIVTFDAHGISGHPNHKSLHAGAHSFLKALMHRHSGWECPVKLYTLTTIPIFRKYLGLFDAPATIIGAMLQKKQLGGFPTPLLFASSPIGYRTAQKAMTTAHESQMRWFRWGWITLSRYMVLNDLKLEKTL

SEQ ID NO: 7 - DNA, 840 bp, Bipolaris victoriae
  misc_feature: Bipolaris victoriae FI3
atgaattggaccgtctgggcatcggtgcccctcctcatcttcgccttctggatgtacaccagcacgctcagcgcatccttccccaccctgcacaacaaacgcattctgcttctcatagcacatccagatgacgaggccatgttctttgccccggctctgcttgcattgacgcgtccagaacacggaaatcacgtcaagatcctgtgcctgagcagtggcgatgccgacgggctgggccacgtacgcaagaaagagttagtcaagagcgggctgcaattgggtattaggagcgaagatgacattcttgtcgttgaggacaagaactttcccgactccatgaccgtaacatggcaccctcgtctaatctccaacctgcttaccacggcctttgccccagacatgtcttcgatttcttccaaggatgcaccgcaggccactattgacgccatcatcacatttgacgcacacggcatctccggccaccccaatcacaagtcgctccacgccggagcccacagcttcctcaaggcactcatgcaccgtcacagcggctgggagtgtcccgtcaagctgtacacgcttacgaccatcccaatcttccgcaaatacctcggcttattcgacgcccctgctaccattgttggcgcaatgctgcaaaagaagcagctgggggggttcccaactccactcctgtttgccagctcaccgatcggttacaggacggctcagaaggccatgactactgcgcatgagagccagatgcgctggttccgctggggctggatcaccctatcgcggtacatggtattaaacgagctgaaactcgaaaagacactttaa

SEQ ID NO: 8 - protein, 279 aa, Bipolaris victoriae
MNWTVWASVPLLIFAFWMYTSTLSASFPTLHNKRILLLIAHPDDEAMFFAPALLALTRPEHGNHVKILCLSSGDADGLGHVRKKELVKSGLQLGIRSEDDILVVEDKNFPDSMTVTWHPRLISNLLTTAFAPDMSSISSKDAPQATIDAIITFDAHGISGHPNHKSLHAGAHSFLKALMHRHSGWECPVKLYTLTTIPIFRKYLGLFDAPATIVGAMLQKKQLGGFPTPLLFASSPIGYRTAQKAMTTAHESQMRWFRWGWITLSRYMVLNELKLEKTL

SEQ ID NO: 9 - DNA, 840 bp, Bipolaris zeicola
atgaattggaccgtctgggcatcgctgcccctcctcatcttcgccttctggatgtacaccagcacgctcagcgcatccttccccaccctgcacaacaaacgcattctgcttctcatagcacatccagatgacgaggctatgttctttgccccggctctgcttacattgacgcgtccagaacacggaaatcacgtcaagatcctgtgcctgagcagtggcgatgccgacgggctgggccacgtgcgcaagaaagagttagtcaagagcgggctgcaattgggtattaggggcgaagatgacattcttgtcgttgaggacaagaactttcccgactccatgaccgtaacatggcaccctcgtctaatctccaacctgcttaccacggcctttgccccagacctgtcttcgatttcttccaaggatgcaccgcaggccactattgacgccatcatcacatttgacgcacgcggcatctccggccaccccaatcacaagtcgctccacgccggagcccacagcttcctcaaggcactcatgcaccgtcacagcggctgggagtgtcccgtcaagctgtacacgcttacgaccatcccaatcttccgcaaatacctcggcttattcgacgcccctgctaccattattggcgcaatgctgcaaaagaagcagctgggggggttcccaactccactcctgtttgccagctcaccgatcggttacaggacggctcagaaggccatgactactgcgcatgagagccagatgcgctggttccgctggggctggatcaccctatcgcggtacatggtattaaacgacctgaaactcgaaaagacactttaa

SEQ ID NO: 10 - protein, 279 aa, Bipolaris zeicola
MNWTVWASLPLLIFAFWMYTSTLSASFPTLHNKRILLLIAHPDDEAMFFAPALLTLTRPEHGNHVKILCLSSGDADGLGHVRKKELVKSGLQLGIRGEDDILVVEDKNFPDSMTVTWHPRLISNLLTTAFAPDLSSISSKDAPQATIDAIITFDARGISGHPNHKSLHAGAHSFLKALMHRHSGWECPVKLYTLTTIPIFRKYLGLFDAPATIIGAMLQKKQLGGFPTPLLFASSPIGYRTAQKAMTTAHESQMRWFRWGWITLSRYMVLNDLKLEKTL

SEQ ID NO: 11 - DNA, 840 bp, Bipolaris oryzae
atgaattggaccgtctgggcatcggtgcccctccttgtcttcgccttctggatgtataccagcactctcagtgcatccttccccaccctgcacaacaaacgcattttgctcctcatagcgcatccagatgacgaggccatgttctttgccccggctctgcttgcattgacgcgtccagaacacggaaatcacgtcaagatcctgtgtttgagcagtggcgatgccgacgggctgggccacgtgcgcaagaaagagctagtgaagagcgggctgcaattgggcattcggagcgaagatgacattctggtcgtcgaggacaagaacttccccgactccatgaccgtaacatggcaccctcgtctaatatccaacctgcttaccacggcctttgccccaggcatgtcttcgatttcttccaaggacgcaccgcaggccaccatcgacgccatcatcacatttgacgcacacggcatctctggccaccccaatcacaaatcgctccatgccggagctcacagcttcctcaaggcgctcatgcaccgtcacagtggctgggagtgtcctgtaaaactgtacacgcttacgaccattcccatcttccgcaaatacctcggcttattcgacgcccctgctaccatcattggcgcaatgctgcaaaagaagcagctgggggggttcccaactccactcctgtttgccagctcaccgatcggttacaggacggctcagaaggccatgactactgcgcatgagagccagatgcgctggttccgctggggctggatcaccctatcacgctacatggtattaaacgagctgaaactcgaaaagactctctaa

SEQ ID NO: 12 - protein, 279 aa, Bipolaris oryzae
MNWTVWASVPLLVFAFWMYTSTLSASFPTLHNKRILLLIAHPDDEAMFFAPALLALTRPEHGNHVKILCLSSGDADGLGHVRKKELVKSGLQLGIRSEDDILVVEDKNFPDSMTVTWHPRLISNLLTTAFAPGMSSISSKDAPQATIDAIITFDAHGISGHPNHKSLHAGAHSFLKALMHRHSGWECPVKLYTLTTIPIFRKYLGLFDAPATIIGAMLQKKQLGGFPTPLLFASSPIGYRTAQKAMTTAHESQMRWFRWGWITLSRYMVLNELKLEKTL

SEQ ID NO: 13 - DNA, 849 bp, Botrytis cinerea
  misc_feature: Botrytis cinerea B05.10
atgcaatggacctatttccttaccatccctatcatcactttcgctgcatggcaatacagtgtcacagtcgttaactccaaatttcccaagcttcgtaacaagaagatatgtctgttgatcgcgcatcctgatgacgaagctatgttttttgcgccagcgatgcaagctcttacggatccggagcttggaaaccatgttaaaattctctgtttgagcagtggtgatgcagatggattaggggaaactcggaagaaggaacttgttaagagtgggatgcagttgggtttgcgacaagagaatgatgttttcgtttttacgagtccagatttcccggatagcatgacgaagatatgggacaaagaaaagatcgcaaaccttttggcgtctgcattttgccctccccatacaagaaaaacagatcttacaactgctccaactgcaaccatcgatgttattgtaacttttgatgcgcagggaatttcttcgcatccaaatcatatttccttgtaccatggctctcggactttaatcgcatctatgatgcgggatcgtccaggatggcaatgtcctattgatctttacacacttaccagtgtctcaatcttccgaaagtacacatctatattcgataccttgaatactatggcagccgcagcattttcgaagcgagagataggcgatcacccaagtcctttgttaatgatgagtggagtgggacaacttagaactgcgcaaaaggccatgacaacagcacacaagagtcagatgaggtggttcagatggggttggattggaatgtcaagatatatggtcattaatgatttaaaattggaaaaggtcgttgtgtag

SEQ ID NO: 14 - protein, 282 aa, Botrytis cinerea
MQWTYFLTIPIITFAAWQYSVTVVNSKFPKLRNKKICLLIAHPDDEAMFFAPAMQALTDPELGNHVKILCLSSGDADGLGETRKKELVKSGMQLGLRQENDVFVFTSPDFPDSMTKIWDKEKIANLLASAFCPPHTRKTDLTTAPTATIDVIVTFDAQGISSHPNHISLYHGSRTLIASMMRDRPGWQCPIDLYTLTSVSIFRKYTSIFDTLNTMAAAAFSKREIGDHPSPLLMMSGVGQLRTAQKAMTTAHKSQMRWFRWGWIGMSRYMVINDLKLEKVVV

SEQ ID NO: 15 - DNA, 840 bp, Botryosphaeria parva
atgtcgtggctcacctgggccgccgctccagtcctcatcgccgccctatggctgtacacggtgcagatgagccgctcgctgcccaccctgcagggcaagcgcatcgccctgctgatcgcccacccggatgatgaggctatgttctttgcgccgaccatccaggccctgacgcgtccggagctggggaaccacctgaagatcctctgtctgtccagcggcgatgcggacggcctaggcgagacacgcaagcaggagctgctgaagagcggcatgctcctcggcctccggagcgaagacgacatgctcgtcatcgaagacagcaacttccccgactcgatgagcgtaacctggaacccgcgcctgctctccaacctcctcaccaaagccttcgcgcccaacatgtcgtcgacgccgtccacgcgcgcgcccgaggccaccatcgacgcgatcataaccttcgacgcgggcggcgtgtcgggccaccccaaccaccggtcgctgtacgcgggcgcgcacgccttcctgaaggccctgatgcaccgccacgccggctgggactgcccggtgaagctgtacaccctgacgacggtcaacatcgcgcgcaagtacgccagcgtgctggacggcccgctgaccgtgctgagcgtgctgctgcgcaggaaggaggtcggcagcttccccacgccgctgctgttcgtgaacagcccgccgcaggtgcgcaccgcgcagggcgccatggtcaaggcgcacaagagccagatggtgtggttccggtgggggtggatcgggatcgggaggtacatggtgatgaatgacttgaagaaggagaaggtgctgtga

SEQ ID NO: 16 - protein, 279 aa, Botryosphaeria parva
MSWLTWAAAPVLIAALWLYTVQMSRSLPTLQGKRIALLIAHPDDEAMFFAPTIQALTRPELGNHLKILCLSSGDADGLGETRKQELLKSGMLLGLRSEDDMLVIEDSNFPDSMSVTWNPRLLSNLLTKAFAPNMSSTPSTRAPEATIDAIITFDAGGVSGHPNHRSLYAGAHAFLKALMHRHAGWDCPVKLYTLTTVNIARKYASVLDGPLTVLSVLLRRKEVGSFPTPLLFVNSPPQVRTAQGAMVKAHKSQMVWFRWGWIGIGRYMVMNDLKKEKVL

SEQ ID NO: 17 - DNA, 834 bp, Cercospora beticola
atgatcaccctcttataccagatcccagcgctcatcttggcactatggctcttcaccgcgtatatgacaagatcattcccaaccatcatgggcaagcgcatctgcctcgtcatcgcccacccggacgacgaagcaatgttcttcgcgccaacacttcgctacctctccaacccggagctcggaaaccaaatcgtcatcatctgcttcagcagcggtgatgccgacggcctaggacacatccgcaaaaaggagctcatagactcagcacttttactcggagtccgcaaaccagagcacgtcttcgtgatagaagacaagaattttccagattcaatgacagcaacgtgggatgcgaaattgatctcgcaaacgctgctcaaagccttcgctcccaatgctagcagtacgcctacgaataaggccccagaagcgaacattgatgtcctgatcacgttcgacgagggaggagtcagcggacatccgaatcacatctcgcttttacacggctgtacgacgtttttgaagacattgatgcagcgtcatacagggtgggagaatccggtgaagctttatacactcacgtcagtaaacatagtgaggaagtatagcagcatactggactcggcggcgagcgttctggcaactgtcttgggttccaaagagaaaggagcttttcccaatcctttgcttatggtaagctcgcccggagatgtgaggaaggcgcagcaagcgatgacaaatgcacatgtcagtcagatgcgatggttcagatgggggtggattgggatttctcgatacatggtcgtgaacgatttgaagaaacggaagggcgtg

SEQ ID NO: 18 - protein, 278 aa, Cercospora beticola
MITLLYQIPALILALWLFTAYMTRSFPTIMGKRICLVIAHPDDEAMFFAPTLRYLSNPELGNQIVIICFSSGDADGLGHIRKKELIDSALLLGVRKPEHVFVIEDKNFPDSMTATWDAKLISQTLLKAFAPNASSTPTNKAPEANIDVLITFDEGGVSGHPNHISLLHGCTTFLKTLMQRHTGWENPVKLYTLTSVNIVRKYSSILDSAASVLATVLGSKEKGAFPNPLLMVSSPGDVRKAQQAMTNAHVSQMRWFRWGWIGISRYMVVNDLKKRKGV

SEQ ID NO: 19 - DNA, 840 bp, Cochliobolus sativus
atgaattggaccatctgggcatcggtgcccctcctcatcttcgccttctggatgtacaccagcacgctgagcgcatccttccccaccctgcacaacaaacgcattctgctcctcatagcgcatccagatgacgaggctatgttctttgccccggctctgcttgcattgacgcgtcctgaatacggaaatcatgtcaagatcttgtgtttgagcagtggcgatgccgatgggctgggccacgtgcgcaagaaagagctagtcaagagcgggctgcaattaggcattcggagcgaagatgacattcttgtcgtcgaggacaagaacttccccgactccatgaccgtaacatggcaccctcgtctaatttccaacctgcttaccacggcctttgcccccgacatgtcttcggtttcttccaaggacgcaccgcaggccgccatcgacgccatcatcacatttgacgcacacggcatctccggccaccccaatcacaagtcgctccatgccggagcccacagcttcctcaaggcgctcatgcaccgacatagcggctgggagtgtcccgtcaagctgtacacgcttacgaccattccaatcttccgcaaatacttcggcttgttcgacgcccctgctaccatcattggcgcaatgctgcaaaagaagcagctgggggggttcccaactccactcctgtttgccagctcaccgatcggttacaggacggctcagaaggccatgactactgcgcatgagagccaaatgcgctggttccgctggggctggatcaccctatcacgctacatggtgctgaacgacctgaaactcgaaaagactctctaa

SEQ ID NO: 20 - protein, 279 aa, Cochliobolus sativus
MNWTIWASVPLLIFAFWMYTSTLSASFPTLHNKRILLLIAHPDDEAMFFAPALLALTRPEYGNHVKILCLSSGDADGLGHVRKKELVKSGLQLGIRSEDDILVVEDKNFPDSMTVTWHPRLISNLLTTAFAPDMSSVSSKDAPQAAIDAIITFDAHGISGHPNHKSLHAGAHSFLKALMHRHSGWECPVKLYTLTTIPIFRKYFGLFDAPATIIGAMLQKKQLGGFPTPLLFASSPIGYRTAQKAMTTAHESQMRWFRWGWITLSRYMVLNDLKLEKTL

SEQ ID NO: 21 - DNA, 1047 bp, Colletotrichum graminicola
  misc_feature: Colletotrichum graminicola M1.001
atggcctcgtacttgttcgtcggcgccctgtcggtggcagtcacccccgcattatacacgtacctagtgcggctgctcgcgccgcgcctgtcgacccttgagaacaaacgaatctgccttctgatcgcccacccggacgacgaggccatgtttttcgcccccaccgtcctggccctcaccaagcccgacaccggaaaccacgtcaagatcttgtgtctgagctcaggtgacgccgatggtttgggcgagacccgtaagaaggagctggtcaagagcggcatgaagctcggcctgcaacaagaacaagacgtctttgtcattgagagccccgacttccaagattccatgaccaagacctgggacgagacaaagatcgccgccctcctcggccgcgccttcgccccgcagctcgcccgccagcgcgccgccggcgagcagcccgccgccaacatcgacgtcctcatcaccttcgacgccgccggcgtctcctcccacccgaaccacatctcgctgtaccacggcgcccgcgccttcatctccgccctctccgccgacccgcgctggccctcccccgtcgacctctacaccctgacctccgtctccctcctgcgcaagtacagcaacttcctcgacacgatacccaccctcctctcctgggccaccacgtccggcagcaacccgccgaagccgcccaagaagcccaagaagacggaagagggggagaataacagcgatgaggacgacgaggatgagaaggacgactaccaccccacagcgctggtcttcctcagcgggctgggcaccaacggcggctgggcgacggcgtggagcgccatgacgacggcgcacaagagccagatggtctggttccggtacggctggctctcgctgagcaggtacatggtgatcaacgacctgcggctcgagacggtcgtcggtgcccaggaggccaagctcgagacggtcgtcgctgcccaggaggccaaggcccgacccgcgccagccgacaagagaaagaaagagagaaaaagcaaaaagggaaaataa

SEQ ID NO: 22 - protein, 348 aa, Colletotrichum graminicola
MASYLFVGALSVAVTPALYTYLVRLLAPRLSTLENKRICLLIAHPDDEAMFFAPTVLALTKPDTGNHVKILCLSSGDADGLGETRKKELVKSGMKLGLQQEQDVFVIESPDFQDSMTKTWDETKIAALLGRAFAPQLARQRAAGEQPAANIDVLITFDAAGVSSHPNHISLYHGARAFISALSADPRWPSPVDLYTLTSVSLLRKYSNFLDTIPTLLSWATTSGSNPPKPPKKPKKTEEGENNSDEDDEDEKDDYHPTALVFLSGLGTNGGWATAWSAMTTAHKSQMVWFRYGWLSLSRYMVINDLRLETVVGAQEAKLETVVAAQEAKARPAPADKRKKERKSKKGK

SEQ ID NO: 23 - DNA, 2097 bp, Colletotrichum gloeosporioides
  misc_feature: Colletotrichum gloeosporioides Cg-14
atggattctttgctcgtgggggccctgattgtggccgtcacgcctgcattgtatatttgcctcggccccctcgcagcgtcgcagttgcccgctctcgagaacaagagggtctgcctcttgatcgcgcacccagacgatgaggccatgttctttgcgccgaccgtcctcgctcttacgcgacccgagacgggcaaccatgtcaagattttgtgtctgagttcaggtgacgccgatggcctcggagaaactcgcaagaaggagttggtgaagagcggcatgaagttgggcttgcgccaggagcaggatgtttttgttattgacagccctgatttcagggactccatgaccgccacctgggataaaaccaaggtcgctacactcctgaaccgcgcctttgcgcctcactctgctcgccagcgagctgctggtgaggagccagacgccaacatcgacatcttgatcactttcgactcgaccggagtctcttcccacccgaaccacatctctctctaccatggtgcccgtacattcatctccactttgaccgataacggccgctggcgctcgcccgtagacatgtacacactgacttcagtaaacttcttgcgcaagtacagcacatttctcgatgcggtaccaacaattttgtcatgggcgatcacgccaggaagcaacccgccgaagccgccaaagaagctaccgaaacccaagaaggagaaggaagatagcgatgacgataccgactcggatgaggatgagtcggacattgagtaccaccccagccggctggtgttcatgaacaactttggtcccaagggtggatattccacggcgtgggccgccatgaccatggcgcataagagccagatggtctggttccggtacggctggatcaccctcagcagatacatggtcatcaacgacctacgattggagaagatcgaggacatgcctctggtcgagctgccggcgatcgaggcgccgccagaggccaagcggtccgagagcaagcggtccgaaaccaggcaccgcgagaggaagcactctgagtcgtccaagaaggaggagaccaaggagcgggagtccaagaggtctgagaagtctgagggcaagcagcgtgagagcaagagggaggaaacgaagcaccgtgaatccaagaaggacgagacgaagcaccgcgagagcaagcacgccgagcccaagaaggaggagatcaaggagcgagagacaaagaaggaggacaccaaggagcgcgagtccaggaaggctgagaaggccgagaaggccgagaaggccgagaaggccgagaaggccgagaagatcgagaagatcgagaagatcgagaaggccgagaaggctgagaagtccgagaagcgggagggcaagcaggtcgagttcgcccctatcgagtcggtcgaaaccaagttcttcgaggtgccaaaggaggagaccaaggagcgcgagtccaagaggtcggagaagcgtgagagccggcactcggagtccaagaaggaggagaaggaggatgccaaggagcgtgaggccaggaaggccgagaaggccgagaagcgtgagcgtgagcgtgagcgtgaacgcgagcgtgagagcaagagagaggagaaggaggatgccaaggagcgcgaagccaggaaggccgaaaagcgggagcgcgagcgcgagcgtgagcgtgagagagagcgtgagagcaggcactctgagaagcgcgagagcagacactccagcagcagacactcttcgagtggacttcccggagccagcctccccgacgccagacgctctgagcccagcttgagacaccctgcaggcagcctccccgaagccagccgctccgagagcagacttctcgaccccagacactctgagagctctcaccccccgtccagcagcagatacgtcgaaggcagacactcttcgagcaagcgctcctccagcagacactccgagagcagcagagtctcctccaccagccactccgagcgcagacaccgcgacagcaaccgcgacggacaccgcagacgttcctccagcaaggtctccaggaccggcagcgagagatcttacgccagcagatcttag

SEQ ID NO: 24 - protein, 698 aa, Colletotrichum gloeosporioides
MDSLLVGALIVAVTPALYICLGPLAASQLPALENKRVCLLIAHPDDEAMFFAPTVLALTRPETGNHVKILCLSSGDADGLGETRKKELVKSGMKLGLRQEQDVFVIDSPDFRDSMTATWDKTKVATLLNRAFAPHSARQRAAGEEPDANIDILITFDSTGVSSHPNHISLYHGARTFISTLTDNGRWRSPVDMYTLTSVNFLRKYSTFLDAVPTILSWAITPGSNPPKPPKKLPKPKKEKEDSDDDTDSDEDESDIEYHPSRLVFMNNFGPKGGYSTAWAAMTMAHKSQMVWFRYGWITLSRYMVINDLRLEKIEDMPLVELPAIEAPPEAKRSESKRSETRHRERKHSESSKKEETKERESKRSEKSEGKQRESKREETKHRESKKDETKHRESKHAEPKKEEIKERETKKEDTKERESRKAEKAEKAEKAEKAEKAEKIEKIEKIEKAEKAEKSEKREGKQVEFAPIESVETKFFEVPKEETKERESKRSEKRESRHSESKKEEKEDAKEREARKAEKAEKRERERERERERESKREEKEDAKEREARKAEKRERERERERERERESRHSEKRESRHSSSRHSSSGLPGASLPDARRSEPSLRHPAGSLPEASRSESRLLDPRHSESSHPPSSSRYVEGRHSSSKRSSSRHSESSRVSSTSHSERRHRDSNRDGHRRRSSSKVSRTGSERSYASRS

SEQ ID NO: 25 - DNA, 966 bp, Colletotrichum higginsianum
atgggctggagtgctttcattggcgccctgctggtggctctcgcaccggcactgtacatatacttggttccgctgctcacgccgcgcctgccgaccctggaggataaaagaatatgtctcctaattgcgcacccggatgatgaggccatgttctttgcaccaaccgtcctggcccttaccaagcctgagaccggcaaccacgtcaagatcttgtgtttgagctcaggtgacgccgatggtctgggcgagactcgtaagaaagaattggtcaagagtggtatgaagctcggcctgcagcaggagcaagacgtcttcgtcattgaaagccccgacttccaagactccatgaccaacgtctgggacaagaccaagatcgcctccctcctcggccgcgccttcgccccgcagcttgcgcggcagcgcgctgccggcgaggaacccgacgccaacattgacgtcctcatcaccttcgactcgctcggtgtctcctcccacccgaaccacatctcgctgtatcatggcgcccgcgccttcatcgccgccctctccgccgacccgcgctggccctcccctgtcgacctgtacaccctgacctcggtctccgttgcccgcaagtacagcaacttcctcgacgcgatacccacgctgttctcctgggtcaccacggccggcagcaaccccccaaaaccgcccaaaaagccgaagaaagatcatggcgatgacgacgatgatagcgaggacggggacgaggacgacaacgacaactaccacccgaccgccctcgtgttcctcagcgagctgggctctcacggcggctgggcgacggcgtggagcgccatgacgacggcgcacaagagccagatggtctggttccggtacggctggatcgcgttgagcagatacatggtgctcaacgacctgcggctggaaaaggtcgaggccgatgacgggaacgcaaaggcctga

SEQ ID NO: 26 - protein, 321 aa, Colletotrichum higginsianum
MGWSAFIGALLVALAPALYIYLVPLLTPRLPTLEDKRICLLIAHPDDEAMFFAPTVLALTKPETGNHVKILCLSSGDADGLGETRKKELVKSGMKLGLQQEQDVFVIESPDFQDSMTNVWDKTKIASLLGRAFAPQLARQRAAGEEPDANIDVLITFDSLGVSSHPNHISLYHGARAFIAALSADPRWPSPVDLYTLTSVSVARKYSNFLDAIPTLFSWVTTAGSNPPKPPKKPKKDHGDDDDDSEDGDEDDNDNYHPTALVFLSELGSHGGWATAWSAMTTAHKSQMVWFRYGWIALSRYMVLNDLRLEKVEADDGNAKA

SEQ ID NO: 27 - DNA, 879 bp, Claviceps purpurea
atggcctcgtggctcgggatcagcttcctgatgaccctgctggtccttcttcccgccctatacacatacctcgtacgcgccatgcaggcccgactccccgccctccgcagcaagcgcatctgcctcctcatagcgcaccccgacgacgaggccatgttcttcgccccgaccgtactggccctgacgcggccgcagacggggaaccacgtcaagattctgtgtctaagtacaggcaatgcggatggacttggcgaaacgcgaagaaaagaactcgtcaagagtggtgtgcatctagggctgaggggtgaggatgatgtattcgtggtggacaattcaaccgacttccccgactccatgaccgcaaagtgggatgccacccgcatcgcaaccttgctctgcagcgcttttgcgccgcaggtgagcccacagcgagtctccgacgctgccagcaagcccactgccaatatcgatgttctcatcacgtttgatgcccatggggtgtcgtcgcatccgaatcatatatcgctgtaccacggcgcgcggctcttcctctcgacgctgatgcgcgggaaggctgagtggacgtgtcctgtcgacttgtataccctgacgtcggtccctatggcgcggaaatacagcgggtttctggatgtctttgcgactatggcggtctgggttgctggatcacggcagggcgacaagacgcatccgggggggctgctttttatgaaccagcttctgggggaacaggggctgccaagggcatggggcgcgatgacgagggcgcataagagccagatggtttggttccggtacttttggatcttgctgagtcggtatatgttgatgaatgacttgaagctggaggaggtagcgtga

SEQ ID NO: 28 - protein, 292 aa, Claviceps purpurea
MASWLGISFLMTLLVLLPALYTYLVRAMQARLPALRSKRICLLIAHPDDEAMFFAPTVLALTRPQTGNHVKILCLSTGNADGLGETRRKELVKSGVHLGLRGEDDVFVVDNSTDFPDSMTAKWDATRIATLLCSAFAPQVSPQRVSDAASKPTANIDVLITFDAHGVSSHPNHISLYHGARLFLSTLMRGKAEWTCPVDLYTLTSVPMARKYSGFLDVFATMAVWVAGSRQGDKTHPGGLLFMNQLLGEQGLPRAWGAMTRAHKSQMVWFRYFWILLSRYMLMNDLKLEEVA

SEQ ID NO: 29 - DNA, 846 bp, Diplodia seriata
atgtcgtggcttacctgggccaccttccccatcctcgccgccgcgctgtggatctacacggtgcagatgagccgctcgctgccgaccctcgagggcaagcgcatcgcgctgctgatcgcgcacccggacgatgaggccatgttcttcgcgcccacgatccaggccctgacgcgtccggagctggggaaccacctcaagatactgtgcctgtcgagcggcgacgccgacggcctgggcgagacgcgcaagcaggagctgctgaagagcgggatgctgctgggtctgcggagcgaagacgacatgctcgtcatcgaagacagcaacttcccagactccatgaccgcaacctggtccccgaagcacctctcggccctcctcgccaaagccttcgcgcccaacatcagcaccacgcccgcgacgcgcgccccggaggcgaccgtcgacgccatcgtcaccttcgacgcgggcggcgtgtcgaaccaccccaaccaccgctcgctctaccacggcgcgcacgccttcctcagggagctcatgcggcgccacgccggctgggactgccccgtcaagctgtacacgctgacgtcggtcaacatcgcgcgcaagtatgttagtgtgctggacgcgccgctgacggtgctgagcgtgctgctgcagtggcgcaagaaggaggcggggagcttcccgtcgccgctgatgtttgtcagcggggtgcggcaggtgaggacggcgcaggcggccatggtcgaggctcacaagagccagatggtgtggttccggtgggggtggatcggcatcggaaggtatatggtcatgaacgatctgaggaaggagaaggtgggttga

SEQ ID NO: 30 - protein, 281 aa, Diplodia seriata
MSWLTWATFPILAAALWIYTVQMSRSLPTLEGKRIALLIAHPDDEAMFFAPTIQALTRPELGNHLKILCLSSGDADGLGETRKQELLKSGMLLGLRSEDDMLVIEDSNFPDSMTATWSPKHLSALLAKAFAPNISTTPATRAPEATVDAIVTFDAGGVSNHPNHRSLYHGAHAFLRELMRRHAGWDCPVKLYTLTSVNIARKYVSVLDAPLTVLSVLLQWRKKEAGSFPSPLMFVSGVRQVRTAQAAMVEAHKSQMVWFRWGWIGIGRYMVMNDLRKEKVG

SEQ ID NO: 31 - DNA, 855 bp, Fusarium fujikuroi
  misc_feature: Fusarium fujikuroi IMI 58289
atgaacgttcttcacatcttcgccggcctcgccgttgtggtgccaggcatctacatgttcactgccagctctgcccaatcgaccatcaagaacaagcgggtttgtctcttgattgcgcaccccgacgacgaagccatgttcttctccccgaccgtcctcgccctcacacgacccgagaacggaaaccacgtcaagattctatgcctaagcactggagatgccgacggattaggagaagttcgcaagaaggagctagtcaagagcggcctggcgctgggactgcagagcgaggacgatgtttttgtggtcgacaaccccaccgacttccccgactccatgacgagaatgtgggacaagaacctgattgctcgtctgctaggaagcacgtttgcgcccaagtttggccaggagcgtaagaacaatctgaagcccactgccaacattgacatcctcgttacatttgacagcaatggcgtgtcttctcatcccaaccatatctctctctacctgggtgccagatccttcatccaggcccttaccaccgcgtccgagtggccgagcccggtcgatctatataccctttccaccgtaggcattgtgcgcaagtactccgccttcatggactttattcccacgctactctcatccattggtgtcaaggatcaggataaggagcgacccgaaagtctggtgttcatgaaccagctcgttggtcgcggtgcctatggcactgcttggagcgccatgacacaagcgcacagaagccagatggtttggttccgctatggctggatcaccctcagccggtatatggtcatcaacgatctacgtcttgaaaaggttaagccacagtga

SEQ ID NO: 32 - protein, 284 aa, Fusarium fujikuroi
MNVLHIFAGLAVVVPGIYMFTASSAQSTIKNKRVCLLIAHPDDEAMFFSPTVLALTRPENGNHVKILCLSTGDADGLGEVRKKELVKSGLALGLQSEDDVFVVDNPTDFPDSMTRMWDKNLIARLLGSTFAPKFGQERKNNLKPTANIDILVTFDSNGVSSHPNHISLYLGARSFIQALTTASEWPSPVDLYTLSTVGIVRKYSAFMDFIPTLLSSIGVKDQDKERPESLVFMNQLVGRGAYGTAWSAMTQAHRSQMVWFRYGWITLSRYMVINDLRLEKVKPQ

SEQ ID NO: 33 - DNA, 2124 bp, Fusarium graminearum
  misc_feature: Fusarium graminearum PH-1
atggactctggcgatggccagagagactcgccgctctcaataacctccaatattgcaggcattttgacatttgtcgttgccattgcggcagcattctacgcccgtctcacatatctacggaatagtgatgacgagttcttccgcgtcaaaacgtctttgtcgtggtataagaccgaatccacatggctggcagatcttgtaacagccatcaatgcccagcatgaaggcttccattcgcatcagcccgagtatcagatgtattcctttgtaatggacgacctgcttaatcttgaacagcgtctgctggacattgttgctgagacggaggccaagtcgagcatgagcgacgatggtgaaagctggacactcatgccacggggttggagcggccgcacaacagtagccatggcttggttacgggtgcgaaccaaggctctggagctagtcagacagcgggaaggtctaacagcaagggtgcagttcatgcaaatgagtatgatctcctctcgactgcgggaccttgaatcgaggacgaaatggcgagaaatgaagatggatgagagttcacggaagcttgaatctctaattgagaaccaaagagatcgaattcatcggctggaagacctcgtacgacggtggacacatcgtgatcattctagtctttcacgggccgggacgttgacggatcctgaggtcaaaggtgtagaatgggcaggttcagtggatggtgacggctctacagcaatatctgagtcagcagacgcaattccatcgaggagtgatgatcgcatctcaggtttcgaagattcgttctgtaagaggcgacaagaggggtccttcgccatcgagctcgcgctgtcgacgatcggcttcagcaaacagatcacgaccctttgcgaaatcaacgagggtctccttgtttggaccagtgcgatcaggttgctcgagtttgatatccttgacggacttttctttgcgttgacgagccatgattgggtgcgaaccgaatgttactggaataggcttagcgcatcccacaccaatggaagcctcgggccatgccgcactgcacttcaatgcatgaaggcgatttctctatggcttgaaagatgggcaagggtcttgtcaggcggtgaaccgttgggtgattttacagcgggcagtgattcgcccaccaacgatccgacccgaactgccatctttcagaaatactgtccgttgcaaccgaagccgagtcgcattatcgtttctgaagccaccgccgacatgaacgttcttcacatctttgcaggcctcgccgtcgtggtgccgagcatttacatgctcacagcgaaccaggcccaatcgaccatcaagaacaagcgcgtctgtctcttgatcgcacaccccgatgacgaagccatgttcttctcgcccaccgtcctcgccctcacacgacccgagaacggaaaccacgttaaaattctatgcttgagcactggagatgccgacgggctaggagacgttcgcaagcaagagctggtcaagagcggtttggcgctgggactgcaaaacgaggatgatgtctttgtcgtggacaaccccactgacttcccagactccatgaacagaatgtgggataagaacctgatcgctcgcctactaggaagcacatttgcgcccaagttcggccacgagcgcaagaataacctcaagcctacagccgccattgacatcctcgtcacatttgacagcaacggcgtgtcttctcaccccaaccacatctccctatacctgggtgcccgttccttcattcaggctctcactacgactgagtcggaatggccgagccctgtcgatctatataccttaaaatctgtgggcattgtgcgcaaatactcggccttcatggactttgttcctacactgctctcgcatctcggagtcaataatgagaacaaggaccgtcccgaaggtctggttttcatgaaccagcttgttggccgaggcgcatacggcactgcttggagtgccatgacccaggcgcacaggagccagatggtctggttccgctatggctggatcaccctcagccgatacatggtcatcaatgacctgcgtctcgaaaaggtcaaggcacagtga

SEQ ID NO: 34 - protein, 707 aa, Fusarium graminearum
MDSGDGQRDSPLSITSNIAGILTFVVAIAAAFYARLTYLRNSDDEFFRVKTSLSWYKTESTWLADLVTAINAQHEGFHSHQPEYQMYSFVMDDLLNLEQRLLDIVAETEAKSSMSDDGESWTLMPRGWSGRTTVAMAWLRVRTKALELVRQREGLTARVQFMQMSMISSRLRDLESRTKWREMKMDESSRKLESLIENQRDRIHRLEDLVRRWTHRDHSSLSRAGTLTDPEVKGVEWAGSVDGDGSTAISESADAIPSRSDDRISGFEDSFCKRRQEGSFAIELALSTIGFSKQITTLCEINEGLLVWTSAIRLLEFDILDGLFFALTSHDWVRTECYWNRLSASHTNGSLGPCRTALQCMKAISLWLERWARVLSGGEPLGDFTAGSDSPTNDPTRTAIFQKYCPLQPKPSRIIVSEATADMNVLHIFAGLAVVVPSIYMLTANQAQSTIKNKRVCLLIAHPDDEAMFFSPTVLALTRPENGNHVKILCLSTGDADGLGDVRKQELVKSGLALGLQNEDDVFVVDNPTDFPDSMNRMWDKNLIARLLGSTFAPKFGHERKNNLKPTAAIDILVTFDSNGVSSHPNHISLYLGARSFIQALTTTESEWPSPVDLYTLKSVGIVRKYSAFMDFVPTLLSHLGVNNENKDRPEGLVFMNQLVGRGAYGTAWSAMTQAHRSQMVWFRYGWITLSRYMVINDLRLEKVKAQ

SEQ ID NO: 35 - DNA, 855 bp, Fusarium oxysporum
  misc_feature: Fusarium oxysporum Fo5176
atgaacgttcttcacatcttcgccggcctcgccgttgtggtgccaggcatctacatgttcacagccagcactgcccaatcgacaatcaagaacaagcgagtttgtctcttgattgcgcatcccgacgacgaagccatgttcttctccccgaccgtcctcgccctcacacgacccgagaacggaaaccacgtcaagattctatgcctaagcactggagatgccgacggattaggagaagttcgcaagaaggagctggtcaagagcggcctggcgctgggactgcagagcgaggacgatgtttttgtggtcgacaatcccaccgacttccccgactccatgacgagaatgtgggacaagaacctgattgctcgtctgctaggaagcacgtttgcgcccaaatttggccaggagcgtaagaacaatctgaagcccactgccaacattgacatcctcgttacatttgacagcaatggcgtgtcttctcatcccaaccatatctctctctacctgggtgccagatccttcattcaggcccttaccaccgcgtccgagtggccgagccccgtcgatctatatactctttccaccgtaggcattgtgcgcaagtactctgccttcatggactttgtccccacgctactctcatccattggtgtcaaggaccaggataaggagcgacccgaaagtctggttttcatgaaccagctcgttggccgtggtgcctatggcactgcttggagcgccatgacccaagcgcacagaagccagatggtctggttccgctatggctggatcactctcagccggtacatggtcattaatgatctacgtcttgaaaaggttaagccacagtaa

SEQ ID NO: 36 - protein, 284 aa, Fusarium oxysporum
MNVLHIFAGLAVVVPGIYMFTASTAQSTIKNKRVCLLIAHPDDEAMFFSPTVLALTRPENGNHVKILCLSTGDADGLGEVRKKELVKSGLALGLQSEDDVFVVDNPTDFPDSMTRMWDKNLIARLLGSTFAPKFGQERKNNLKPTANIDILVTFDSNGVSSHPNHISLYLGARSFIQALTTASEWPSPVDLYTLSTVGIVRKYSAFMDFVPTLLSSIGVKDQDKERPESLVFMNQLVGRGAYGTAWSAMTQAHRSQMVWFRYGWITLSRYMVINDLRLEKVKPQ

SEQ ID NO: 37 - DNA, 996 bp, Fusarium pseudograminearum
  misc_feature: Fusarium pseudograminearum (strain CS3096)
atggcctatccagagcttcctttgcgctgccacggtgatccgtccatcaacgatccgacccgaactgccatcttccagaaataccgtccgtcgcaaccgaaaccgagtcgcattatcgtttccgaagccgccgccgacatgaacgttcttcacatctttgcaggcctcgccgtcgtggtaccgagcatttacatgctcacagcgaaccaggcccaatcgaccatcaagaacaagcgcgtctgtctcttgatcgcacaccccgatgacgaagccatgttcttctcgcccaccgtcctcgccctcacacgacccgagaacggaaaccacgttaagattctatgcttgagcactggagatgccgacgggctaggagacgttcgcaagcaagagctggtcaagagcggtttggcgctgggactgcaaaacgaagacgatgtctttgtcgtggacaaccccactgacttcccagactccatgaacagaatgtgggataagaacctgattgctcgcctactaggaagcacatttgcgcccaagttcggccacgagcgcaagaacaacctcaagcctacagccgccattgacatcctcatcacctttgacagcaacggcgtgtcttctcaccccaaccacatctccctgtacctgggtgcccgttccttcatccaggctctcactacgactgagtcagaatggccgagccctgtcgatctatataccctaaaatctgtgggcattgtacgcaagtactcggcattcatggactttgtccctacactgctctcgcatctcggagtcaataatgagaacaaggaccgccccgaaggtctggttttcatgaaccagcttgttggtcgaggcgcatacggcactgcttggagtgccatgactcaggcgcacaggagccagatggtctggttccgctatggctggatcaccctcagccgatacatggtcatcaatgacctgcgtctcgaaaaggtcaaggcacagtga

SEQ ID NO: 38 - protein, 331 aa, Fusarium pseudograminearum
MAYPELPLRCHGDPSINDPTRTAIFQKYRPSQPKPSRIIVSEAAADMNVLHIFAGLAVVVPSIYMLTANQAQSTIKNKRVCLLIAHPDDEAMFFSPTVLALTRPENGNHVKILCLSTGDADGLGDVRKQELVKSGLALGLQNEDDVFVVDNPTDFPDSMNRMWDKNLIARLLGSTFAPKFGHERKNNLKPTAAIDILITFDSNGVSSHPNHISLYLGARSFIQALTTTESEWPSPVDLYTLKSVGIVRKYSAFMDFVPTLLSHLGVNNENKDRPEGLVFMNQLVGRGAYGTAWSAMTQAHRSQMVWFRYGWITLSRYMVINDLRLEKVKAQ

SEQ ID NO: 39 - DNA, 894 bp, Gaeumannomyces graminis
  misc_feature: Gaeumannomyces graminis var. tritici R3-111a-1
atgtcgaccgggctcctgaccgcaggcctcgtggtcgtactggcgcccgtcatgtacgcgtacctgcaatcactcgccgcggcgcgcttcccgaccccgcgcaacaagcgtatctgcctcctgatcgcccacccggacgacgaggccatgttcttttccccgaccgtcctggccctgacccgccccgagacgggcaaccatgtgaaaatcatgtgtctgagcagcggaaacgcggacgggctcggggagacacgcaagaaggagctcgtcaagagcgggatgctgcttggtctgagaaacgaggaggacgtcaccgtcatagagtccgaatcgttcccggactccatgacaacgacatgggaccccaccgccatctcggacctgctgacctcggcctttgcccctgacgctggccgcgcccccgacatcgacatactcgtcacttttgactcccagggcgtctcgtcccaccccaaccacatctcgctctatcacggcgcccgcgccttcgtctcgtcgctgcgccgaggcggatctggcacgctcgccctctacagcctgacctcggtctccttcctgcgcaaatacacatccatactcgatgccgtcgccaccctggcaacgagctgggggttcgccgctggcggcccgccatccaaggccgagggcgggcacccaggggggctggtctttatgaaccctctcggtggtggcagcgggggtggcggtgctcccaccggtcatgatagcagaccaggcggacgcaacgtcgcgaccgcctggagggccatgaccgaagcccacttgagccagatggtatggttccgatatggctggatcactctcagccggtacatggtcgtcaacgacctgaggctagagacagtcgagtga

SEQ ID NO: 40 - protein, 297 aa, Gaeumannomyces graminis
MSTGLLTAGLVVVLAPVMYAYLQSLAAARFPTPRNKRICLLIAHPDDEAMFFSPTVLALTRPETGNHVKIMCLSSGNADGLGETRKKELVKSGMLLGLRNEEDVTVIESESFPDSMTTTWDPTAISDLLTSAFAPDAGRAPDIDILVTFDSQGVSSHPNHISLYHGARAFVSSLRRGGSGTLALYSLTSVSFLRKYTSILDAVATLATSWGFAAGGPPSKAEGGHPGGLVFMNPLGGGSGGGGAPTGHDSRPGGRNVATAWRAMTEAHLSQMVWFRYGWITLSRYMVVNDLRLETVE

SEQ ID NO: 41 - DNA, 846 bp, Leptosphaeria maculans
  misc_feature: Leptosphaeria maculans JN3
atgaattggcttgtctgggcttccttgcccgttgctctgttaggcttttggatgtataccagtatcttggtctcatcctccttccccacacttcgcaacaagcgtattctgctgctgattgcgcacccggatgatgaagccatgttctttgcgccgaccttgctcgctttgacgcagccagagcttgccaatcacatcaagatactctgcctcagtagtggcgatgcagatggcctcggcgagattcgcaaaaaggagctggttaaaagcggccttcgactaggcatcgccagcaaagacgacatcctcgtcatcgaagaccacaacttccccgactctatgacggtgacctggcaccccaggctaatctccaacctcctcactaccgcctttgcccctaacatgtcctccatctcagccaaagatgccccacagactacaattgacacaatcatcaccttcgatacccacggcatctcctctcaccctaaccacagatccctacacgatggcgcacacacatttctcaaagctctcatgcatcgacatagtgcatgggaatgtcctatcagactgtataccctcactacaacatctatattcaggaaatattcaggtatactagatgcgccgacaacgatttggggggctactctcgccaaaaaggatgtcggagagttcccaagccccttgttatttgtgagcagtccaaagggttatcggacagcgcaaagcgccatgaccacggcgcaccagagtcagatgaggtggttccgatgggggtggataggggcggcgaggtatatggttatcaatgacttgaagatcgagaagaggcgatcgtaa

SEQ ID NO: 42 - protein, 281 aa, Leptosphaeria maculans
MNWLVWASLPVALLGFWMYTSILVSSSFPTLRNKRILLLIAHPDDEAMFFAPTLLALTQPELANHIKILCLSSGDADGLGEIRKKELVKSGLRLGIASKDDILVIEDHNFPDSMTVTWHPRLISNLLTTAFAPNMSSISAKDAPQTTIDTIITFDTHGISSHPNHRSLHDGAHTFLKALMHRHSAWECPIRLYTLTTTSIFRKYSGILDAPTTIWGATLAKKDVGEFPSPLLFVSSPKGYRTAQSAMTTAHQSQMRWFRWGWIGAARYMVINDLKIEKRRS

SEQ ID NO: 43 - DNA, 840 bp, Macrophomina phaseolina
  misc_feature: Macrophomina phaseolina (strain MS6)
atgtcctggctcacctgggccgccgtccctatcctagtcgccgcgctgtgggtgtacacggtgcacatgagccgctcgctacctacgctggagggcaagcgcattgcgctgctgatcgcccaccctgacgacgaagctatgttcttcgcgcctacgatacaggccctgacacgaccagagctggggaaccatctcaagatcctgtgcctgtcgagcggcaacgccgatggcctcggcgagacacgcaagcaagaactcctcaaaagcggcatgctcctcggcctgcgcagcgaagacgacatgctagtcatcgaagacgacaacttccccgactccatgaccgcgacctggtcgcccaaacacctcaccgccctgctctccaaagccttcgccccgaacatgacaacgacgccggccacgcgcgccccggccgcgaccatcgacgtcctgctcacctttgacgcgcacggcgtgtccgcgcacccgaaccaccgctcgctgtaccacggcgcgcacgcgttcctcaaggccctcatgcagcggcaccccgggtgggagtgcccgatcaagctgtacacgctgacgagcgtggggctcgcgcgcaagtacgcgagcgtgctggacgcgccggcgacggtggcggcgacgctgctgcgcaagaaagaggtcggcccgttcccgacgccgctgatgttcgtgagcgggccgcgggaggtgaggagggcgcagggcgcgatggtacaggcgcacaagagccagatggtttggtttcggtgggggtggattggcattgggaggtacatggtggtgaatgatttgaagaaggagaaggtggggtaa

SEQ ID NO: 44 - protein, 279 aa, Macrophomina phaseolina
MSWLTWAAVPILVAALWVYTVHMSRSLPTLEGKRIALLIAHPDDEAMFFAPTIQALTRPELGNHLKILCLSSGNADGLGETRKQELLKSGMLLGLRSEDDMLVIEDDNFPDSMTATWSPKHLTALLSKAFAPNMTTTPATRAPAATIDVLLTFDAHGVSAHPNHRSLYHGAHAFLKALMQRHPGWECPIKLYTLTSVGLARKYASVLDAPATVAATLLRKKEVGPFPTPLMFVSGPREVRRAQGAMVQAHKSQMVWFRWGWIGIGRYMVVNDLKKEKVG

SEQ ID NO: 45 - DNA, 858 bp, Magnaporthe oryzae
  misc_feature: Magnaporthe oryzae 70-15
atgtcgacgactctactgacggccgggcttttggtcctgctcgcgccgtgtttgtatatttacacagcatcggtagcggcgacgcgattcccggcgctacgcaacaagcgcatatgcctcctgatcgcccaccctgacgacgaggccatgttctttgcgcccaccgtgcttgcactcacgcgccctgagactggcaaccacgtcaagattctatgcctgagcagcggcaacgcagacgggttgggggagacgcgcaagaaggagctggtcaagagcggcatgctcctgggcctgcgcaacgaggacgacgtctttgtcatcgagtctgacgcctttcaagactccatgacagcgacttgggatgccacagccatctccagccttctcacgtccgcctttgtcccgaacccagccgcaggcgcaatgatcgacgtcctggtgaccttcgacaagggcggcgtctcgtcgcacccgaaccacatctccctataccacggcgcgcgagcctttgtatcctcgggatcggccgtagacctctacactttgacttcggtcccatttttgcgcaaatacgcttcgatcatcgacgcgttcatgacgcttgccatgagctggggtctccagggagtctcggaggccaagagccccgaaagactcgtgtttatgaactcgttgatgccaggcaaggcgcaggagggcggtggtagcaatgacggcggggcgagctatggaacagcttggcgcgccatgaccgaggctcacaagagtcaaatggtatggttccggtatgggtggattacattgagtaggtacatggttgtgaatgacttgaagttggaggggacgagtgcctcgtga

SEQ ID NO: 46 - protein, 285 aa, Magnaporthe oryzae
MSTTLLTAGLLVLLAPCLYIYTASVAATRFPALRNKRICLLIAHPDDEAMFFAPTVLALTRPETGNHVKILCLSSGNADGLGETRKKELVKSGMLLGLRNEDDVFVIESDAFQDSMTATWDATAISSLLTSAFVPNPAAGAMIDVLVTFDKGGVSSHPNHISLYHGARAFVSSGSAVDLYTLTSVPFLRKYASIIDAFMTLAMSWGLQGVSEAKSPERLVFMNSLMPGKAQEGGGSNDGGASYGTAWRAMTEAHKSQMVWFRYGWITLSRYMVVNDLKLEGTSAS

SEQ ID NO: 47 - DNA, 1173 bp, Marssonina brunnea
  misc_feature: Marssonina brunnea f. sp. multigermtubi MB_m1
atgtgtcctttccagaacccagctctcctagttgttgttattgtcgtcggcggcggccttcaacagagctggcccagtctgcagatcccgctcaatccagtcgcaggtactccaatgcttcagcccaggtcggcatcgcatcggccgggccacccctccaaagcgacaggtgtcttcgccgcctggtgcttctctggatactcttcgtctctcctcctcctctcatcctctgctcctctcctcagccatcgacacccaagtgctcaccgcgccggcaacatccctcgtagacgtgctcgatcccgacccgtcgctatgcaatggttcaccgtctttgccattcccctcgtgcttatctcggcctggctgtacaccgtcagtatagcacgcgcgcgatttcccaagctgcgcaacaagcgcatctgtctgttgatcgcgcatcctgatgatgaggccatgttctttgcgccgacgctgttggcgctgacgaatccggagctggggaatcatgtcaagatcctgtgtctgagcagcggagacgcagatggcctgggcgagacgcgcaagaaggaactggtcaagagcggcgtgtccttaggtctgcggaaggaggacgatgtgtttgtggtcgagagcccagagttccccgacagcattaccacggcctgggacaaacagaaaatcgcgaacctcctctcctcggcgtttgcgccgaacctctcgaatcccatgaagaacaaatcggtggatgcgccgacagcgacaatcgatgtcctgattaccttcgacgcctcgggcgtttcctctcaccccaaccacatctcccttttccacggcgcgcgacatttcattgcgtcgctcattcacaatcgcccgggctggggctgcccggtcgacttgtacacgctctcctctgtcagcctggcccggaagtacaccagtttctttgactcgatcataagcatgctcctgatcgcagtatccaacaagcagatgaaggaacacccgagcccactgctcttcctcagtggaatctcagaagtccggacggcgcagggagccatgaccactgcgcacaagagccagatgaggtggtttcgctggggctggattggactcagtcgatatatggtggtcaatgacctgtggctggagaaggtcactgcggcgtaa

SEQ ID NO: 48 - protein, 390 aa, Marssonina brunnea
MCPFQNPALLVVVIVVGGGLQQSWPSLQIPLNPVAGTPMLQPRSASHRPGHPSKATGVFAAWCFSGYSSSLLLLSSSAPLLSHRHPSAHRAGNIPRRRARSRPVAMQWFTVFAIPLVLISAWLYTVSIARARFPKLRNKRICLLIAHPDDEAMFFAPTLLALTNPELGNHVKILCLSSGDADGLGETRKKELVKSGVSLGLRKEDDVFVVESPEFPDSITTAWDKQKIANLLSSAFAPNLSNPMKNKSVDAPTATIDVLITFDASGVSSHPNHISLFHGARHFIASLIHNRPGWGCPVDLYTLSSVSLARKYTSFFDSIISMLLIAVSNKQMKEHPSPLLFLSGISEVRTAQGAMTTAHKSQMRWFRWGWIGLSRYMVVNDLWLEKVTAA

SEQ ID NO: 49 - DNA, 840 bp, Mycosphaerella fijiensis
atgaactggctcctggcatggcaaatacccgttctgatcctatccctgtggatcttcacagcatacatgacaagatccttcccaacactggtcggaaagagaatatgcctcatcatcgcccatcccgatgacgaagccatgttcttcgcgccaactctccgcgctctcacaaaacccgacctcggaaaccaattcgtcctcatatgcttcagcagcggcgacgcagacggactcgggcacatcaggaaagaagaactagtcaagagcgccttacacctaggcatcaaatcttccgaccacgtcgtcgtaatcgaagacaagaatttccaagactccatgactgcgacctgggatgcgaaactcattgcccaaaccctgacgaaattctttgcgccgaatgcttcgacgacgccggttgctacgaatctggaaacgaggatcgatgctttgattacgtttgatgaccgaggtgtctcgggacatccgaatcatatctcgttgtatcatggatgtgtggcgtttttgcggtcgttgatgcaagggaggtcagggtgggagtgtccggtcaagctgtatactttgacttcgacgaatatggtgaggaagtatagtagtgtaatggatgctgctgttacggttctggcatgtattttcaagacgaaggagagaggcgcttatccaacacctctgttaatggtcagtctgccgggagatgtgaagaaggcgcaggaagccatgactacggcgcataagagtcagatgcgttggtttagatggggctggatcggaatctcgaggtatatggtcatgaatgatctgaccaagcaaaaaggtttttag

SEQ ID NO: 50 - protein, 279 aa, Mycosphaerella fijiensis
MNWLLAWQIPVLILSLWIFTAYMTRSFPTLVGKRICLIIAHPDDEAMFFAPTLRALTKPDLGNQFVLICFSSGDADGLGHIRKEELVKSALHLGIKSSDHVVVIEDKNFQDSMTATWDAKLIAQTLTKFFAPNASTTPVATNLETRIDALITFDDRGVSGHPNHISLYHGCVAFLRSLMQGRSGWECPVKLYTLTSTNMVRKYSSVMDAAVTVLACIFKTKERGAYPTPLLMVSLPGDVKKAQEAMTTAHKSQMRWFRWGWIGISRYMVMNDLTKQKGF

SEQ ID NO: 51 - DNA, 837 bp, Mycosphaerella pini
atggactggttaaaagcggtacaaatccccgtgctgatagtggtgttatggctcttcacagcatatatgaccagatccttcccaaccctaaccaataaacgcatatgcctcctaattgcccaccccgacgacgaagccatgttcttcgccccttccctccggtccctcacagcgccagacctcggaaaccaagtcgtaattctctgcttctcctccggtgacgccgatggcctcggccacattcgaaagcaggaactcgcgagatcctgtctcctcttaggcctcagatcttctgaacacgttgtcgttctggaagatcagaatttccccgactccatgacggcggactgggatccgagactggtctctcagacattgatgaagtattttgggccgaaggagggaatgtcgagggatgcggcggtggcaacggggattgatgtgttggtgacgtttgacgagcgaggggtcagtgggcatcctaatcacatctccctcttcaacggagccacaaccttcctacggcaactcatgcaaggacgagcggggtgggagtgtcctgtgaagctctacaccttgacgagtacgaacactgtgaggaagtacagcagtatcctagattcggtgattacggttatgggatgctttttgacgaggaaggaggctgggtcgtatccgacgccgttggtgagtgtgagtacgccgggggacgtgaggaaggcgcagaaggctatgacgacggcgcataagagtcagatgaggtggtttaggtggggatggattgggatcagtcggtacatggtcattaatgacctgcagaagcggaagggcttctga

SEQ ID NO: 52 - protein, 278 aa, Mycosphaerella pini
MDWLKAVQIPVLIVVLWLFTAYMTRSFPTLTNKRICLLIAHPDDEAMFFAPSLRSLTAPDLGNQVVILCFSSGDADGLGHIRKQELARSCLLLGLRSSEHVVVLEDQNFPDSMTADWDPRLVSQTLMKYFGPKEGMSRDAAVATGIDVLVTFDERGVSGHPNHISLFNGATTFLRQLMQGRAGWECPVKLYTLTSTNTVRKYSSILDSVITVMGCFLTRKEAGSYPTPLVSVSTPGDVRKAQKAMTTAHKSQMRWFRWGWIGISRYMVINDLQKRKGF

SEQ ID NO: 53 - DNA, 1740 bp, Puccinia graminis
atgggccgggttgcgtccggatggctcggcccctgtggagcccgcgagggacagtctcggacggtcggaagtcagcctcaagcaagcaaaaaaagaaagatgcatcaacaacaacaactgtatcatcgaacgaccaacaaaccaggccaacatcaagagcaagaaggctcatcattgacaagagcgaaaggagagaaggccgaagccagctacgatgagaagaagaccgacgaccgacggaatgtatcatcaaggacgtatcccaaaacgagtgcttcttggacggtcaagagcacactccaatgtctgatcggctcatacatcatcttcagtttatcagtctatgtggtcgtggtattggtctggaaacaagaatcctctgggccacttgatgacccctcgatcggcacagagtcggcggccttcgatcccgaatggtgggccagtcctaacgtcactcgggccgagcgcatcttgttggtcattgcccatcccgatgacgaaagtctcttcttttcgcccactttactcaacctcttatcgccccgacatctcaatcgaacaacaccaacaacggcaaccttgaacgcatcttcgtctacacaccctcatcattcccagtccccaaagaacaccacctccgaaaacgttccactcacactagactctccgcgggctcacatcctttccttatcctcgggtaatgcggaaggattagggatcaaaaggacgcgcgaaatgcgggcctcttgttgggcctttgggatcccgagcacgtcctgtatcgtcctcgaccatccgagtctgcccgatagtatgtctgtttggtggcctgaagataccatcaacgaatttgttaaactttatgtcgacttgtggaacatcgatctcatcataactttcgatcatcatggagtatcaggccatacaaatcatcgagccatagcgtctgccctaagtcgactagtgcacacagatccgaagtttccgacgacgatgatgctacgctcgccgggattgatcgagaaatacagctcactattctggatgccatatacgctttaccgccaccaccgaactcgcaagtcttttctccctcaacttgcccgccctagctcgcatccctcgcgggacaagaaacggctcgccgagctcgtccttcaaacactcatccatctggacgcttatcataatctctcttcttcttcttcttcttcttcttcttcttcttctttcacttccgacaatgatactctctcgaccccctctctctcagtaagccaagatacccagaagacatcttcaacggatccgataagaaaaagaagaccaagcgactctcgactgtcttcacacaacacactcttgatctctactccaggccaatattgggaagcccgacgggcgttcaaccaacacgtctcccaactggcttggttccggagattgtggctattgagcagtcggttgatgtggatcaacgagcttgctcgagtcgtccccatcgaccatcgtttcgtcgatcatcccgctttccgttctccttctcaggccgaacaaatcctctttcctgtcaaatctaaactcaatccgactcccgcttcttctggagaagaagtgggagaagaaaatcaaaaagttgaagctcgtcttgttctccgtactgatgatgatcgacatccatcgtctcccctcggctctaataagcctcatggtgactcgccttcggatcctcattga

SEQ ID NO: 54 - protein, 579 aa, Puccinia graminis
MGRVASGWLGPCGAREGQSRTVGSQPQASKKRKMHQQQQLYHRTTNKPGQHQEQEGSSLTRAKGEKAEASYDEKKTDDRRNVSSRTYPKTSASWTVKSTLQCLIGSYIIFSLSVYVVVVLVWKQESSGPLDDPSIGTESAAFDPEWWASPNVTRAERILLVIAHPDDESLFFSPTLLNLLSPRHLNRTTPTTATLNASSSTHPHHSQSPKNTTSENVPLTLDSPRAHILSLSSGNAEGLGIKRTREMRASCWAFGIPSTSCIVLDHPSLPDSMSVWWPEDTINEFVKLYVDLWNIDLIITFDHHGVSGHTNHRAIASALSRLVHTDPKFPTTMMLRSPGLIEKYSSLFWMPYTLYRHHRTRKSFLPQLARPSSHPSRDKKRLAELVLQTLIHLDAYHNLSSSSSSSSSSSSFTSDNDTLSTPSLSVSQDTQKTSSTDPIRKRRPSDSRLSSHNTLLISTPGQYWEARRAFNQHVSQLAWFRRLWLLSSRLMWINELARVVPIDHRFVDHPAFRSPSQAEQILFPVKSKLNPTPASSGEEVGEENQKVEARLVLRTDDDRHPSSPLGSNKPHGDSPSDPH

SEQ ID NO: 55 - DNA, 1257 bp, Puccinia striiformis
atgcagcaacaactacaccatcgaaccaacaacaccaaacaacaactgaaaactaatgacaaccaaagccaaacaacccccaatgagaaggagaaggacacaaggaagactcacaaactagccaccccatcccaattggcgttcaatttgagaacttggactttcaagagagtgttcaggtttatcatcagtacaatcaccctcttgagtctatcaatctatgtcatagtattggtcttgaaggattggcctccaaatggtaccacattgaaccccgatggatcgataaatttgtttcaaggagattggtgggtcagtcctaacctgacaagagctgatcgaatcatgctagtaatagctcatcccgatgatgaatgcttgttcttttcgcctaccttacttaaccttttatcacctcgatatgtcaatcgtactgaattcaatgcatctcccttgaagttgaatgaccataatacctctatacacaaaaatttatcgcccaaggctgagcaactaagattagaatcccctatgggtcacattctctctttatcatctggtaacgccgaaggattaggaataaaaagagcaagagaaatgagggcatcgtgttgggcgtttggaatctctagtgagcactgtatggtagtagatcatccagatttgccagatagtatgtcagtttggtggcctgaaaagactatcattgagtttgttgaattctatatcaagttatggaatatagatgccattatcacctttgatcatcatggggtatctggacatataaatcatcgagcaatagcatctgcattaagtcgattagtacacagtgacccccactttccaatgacgtttatgttaagatccaggtctctgatagagaaatacacatccatcatactgtcggtcccactaagtttatacagacataaccgaaatcaccaacaggaaagcctcaacatgacatcaactccaccaatgaaaagaataacagactcaagattatcaacccattcaagtatattcatatccacaccaactgaatattacgagggtagaagagcctttaatcagcacatttctcagcagatttggttcagaagattttggttggtctgtagtagatatatgtggattaatgagctctttagaatcatccctattcatcatcgtttctccgattttgaggaatttcgaaaaccttcaatggcggagaacattatctttccttctaaaattcaaaagaaaaaatag

SEQ ID NO: 56 - protein, 418 aa, Puccinia striiformis
MQQQLHHRTNNTKQQLKTNDNQSQTTPNEKEKDTRKTHKLATPSQLAFNLRTWTFKRVFRFIISTITLLSLSIYVIVLVLKDWPPNGTTLNPDGSINLFQGDWWVSPNLTRADRIMLVIAHPDDECLFFSPTLLNLLSPRYVNRTEFNASPLKLNDHNTSIHKNLSPKAEQLRLESPMGHILSLSSGNAEGLGIKRAREMRASCWAFGISSEHCMVVDHPDLPDSMSVWWPEKTIIEFVEFYIKLWNIDAIITFDHHGVSGHINHRAIASALSRLVHSDPHFPMTFMLRSRSLIEKYTSIILSVPLSLYRHNRNHQQESLNMTSTPPMKRITDSRLSTHSSIFISTPTEYYEGRRAFNQHISQQIWFRRFWLVCSRYMWINELFRIIPIHHRFSDFEEFRKPSMAENIIFPSKIQKKK

SEQ ID NO: 57 - DNA, 1458 bp, Puccinia striiformis
atgcagcaacaactacaccatcgaaccaacaacaccaaacaacaactgaaaactaatgacaaccaaagccaaacaacccccaatgagaaggagaaggacacaaggaagactcacaaactagccaccccatcccaattggcgttcaatttgagaacttggactttcaagagagtgttcaggtttatcatcagtacaatcaccctcttgagtctatcaatctatgtcatagtattggtcttgaaggattggcctccaaatggtaccacattgaaccccgatggatcgataaatttgtttcaaggagattggtgggtcagtcctaacctgacaagagctgatcgaatcatgctagtaatagctcatcccgatgatgaatgcttgttcttttcgcctaccttacttaaccttttatcacctcgatatgtcaatcgtactgaattcaatgcatctcccttgaagttgaatgaccataatacctctatacacaaaaatttatcgcccaaggctgagcaactaagattagaatcccctatgggtcacattctctctttatcatctggtaacgccgaaggattaggaataaaaagagcaagagaaatgagggcatcgtgttgggcgtttggaatctctagtgagcactgtatggtagtagatcatccagatttgccagatagtatgtcagtttggtggcctgaaaagactatcattgagtttgttgaattctatatcaagttatggaatatagatgccattatcacctttgatcatcatggggtatctggacatataaatcatcgagcaatagcatctgcattaagtcgattagtacacagtgacccccactttccaatgacgtttatgttaagatccaggtctctgatagagaaatacacatccatcatactgtcggtcccactaagtttatacagacataaccgaaatcgcgagtcatttctccctgaacttatacgtccaaagtctcatccaacaagagataagaaacgactagccaatatagtgttaaagacactgatacatctcaacaaaactaatcataacttttcttctttaaactcaacctcatatgataatccgaattccaattatccacggatcaatggtgtatctgaacctgataatacagaccaacaggaaagcctcaacatgacatcaactccaccaatgaaaagaataacagactcaagattatcaacccattcaagtatattcatatccacaccaactgaatattacgagggtagaagagcctttaatcagcacatttctcagcagatttggttcagaagattttggttggtctgtagtagatatatgtggattaatgagctctttagaatcatccctattcatcatcgtttctccgattttgaggaatttcgaaaaccttcaatggcggagaacattatctttccttctaaaattcaaaagaaaaaatag

SEQ ID NO: 58 - protein, 485 aa, Puccinia striiformis
MQQQLHHRTNNTKQQLKTNDNQSQTTPNEKEKDTRKTHKLATPSQLAFNLRTWTFKRVFRFIISTITLLSLSIYVIVLVLKDWPPNGTTLNPDGSINLFQGDWWVSPNLTRADRIMLVIAHPDDECLFFSPTLLNLLSPRYVNRTEFNASPLKLNDHNTSIHKNLSPKAEQLRLESPMGHILSLSSGNAEGLGIKRAREMRASCWAFGISSEHCMVVDHPDLPDSMSVWWPEKTIIEFVEFYIKLWNIDAIITFDHHGVSGHINHRAIASALSRLVHSDPHFPMTFMLRSRSLIEKYTSIILSVPLSLYRHNRNRESFLPELIRPKSHPTRDKKRLANIVLKTLIHLNKTNHNFSSLNSTSYDNPNSNYPRINGVSEPDNTDQQESLNMTSTPPMKRITDSRLSTHSSIFISTPTEYYEGRRAFNQHISQQIWFRRFWLVCSRYMWINELFRIIPIHHRFSDFEEFRKPSMAENIIFPSKIQKKK

SEQ ID NO: 59 - DNA, 1413 bp, Puccinia triticina
atgcagcaggcaattttcggcctcccgcacccgcaagctttttcgcattcgctgtatgtcataggccctgccctgccctgccctggtaggctgagcgcgaagatgcaacaacaacaactttaccatcgaaccaacaacaccagacaagctcagcacagagaccagctcataccctcgcagaaccaggccgcacacgatgagaagaagaacggccagcccagtccacggacgcatccgaaccactggacgcccaagaaggcactcaaaaccctcatcagcaccgccgtaatcgcaagtctgtcgatctacgccacggcactggctcgtagagactggccgccggacggccgcctgcgcaaccccgatggatccgccgactcgttccaaggcgagtggtgggtcagcccgaacctgactcgagccgaccgcatcatgctagtcgttgcccatcccgacgacgagtgcctcttcttctcgcccaccctcctcaacctcttgtccccccgcttcgtcaaccggaccgagtttaactcctccaccccgcatccccaaccccagaacaactcttccgaggatgctcagatcaacttagaattcccaagagctcatatcctttccttgtcatctggtaatgccgatggattaggaatcaaacggacgagagaaatgcgcgcctcatgctgggccttcgggatcccaagcccacactgtatcgtcctcgatcatccggagttgccggatagcatgtctgtctggtggcccgaagacacgattgctgaattcgtccggctgtatgttgacttgtgggatatcgatgcgatcatcaccttcgatcatcacggagtatcaggccacgcaaaccaccgagccatagctgctgcactaagtcggcaggtacatagcgatcccaagtttccgatgacattcatgcttcgatcgacgtggatattcgagaaatacacgtcccttctctcgctgccttacactctctaccgccaccaccgcaatctcggccaagaagcccaaaacgcatccgcaaatgccggccgacaagccaggagaagggcgcccaccgactcgcccctgtccccacacgccagcctgttcctctcgacgcccgcccaatactgggaaggcagacgcgccttcaaccaacaccggtcccagcaagtctggttccgacggctctggctcatcaccagtcggttcatgtggatcaacgagctccagcgcgtcgtccccctcgaatcccgcttccaggatcatacctccttccatactccttcccttgccgaaaatatcatctttcccgtcaaacctaaaaaatccgccctctctgagcccgatacgccatcgtctccctcttcccctccaaccaaccagcacattcatactggaccgaccccggattag

SEQ ID NO: 60 - protein, 470 aa, Puccinia triticina
MQQAIFGLPHPQAFSHSLYVIGPALPCPGRLSAKMQQQQLYHRTNNTRQAQHRDQLIPSQNQAAHDEKKNGQPSPRTHPNHWTPKKALKTLISTAVIASLSIYATALARRDWPPDGRLRNPDGSADSFQGEWWVSPNLTRADRIMLVVAHPDDECLFFSPTLLNLLSPRFVNRTEFNSSTPHPQPQNNSSEDAQINLEFPRAHILSLSSGNADGLGIKRTREMRASCWAFGIPSPHCIVLDHPELPDSMSVWWPEDTIAEFVRLYVDLWDIDAIITFDHHGVSGHANHRAIAAALSRQVHSDPKFPMTFMLRSTWIFEKYTSLLSLPYTLYRHHRNLGQEAQNASANAGRQARRRAPTDSPLSPHASLFLSTPAQYWEGRRAFNQHRSQQVWFRRLWLITSRFMWINELQRVVPLESRFQDHTSFHTPSLAENIIFPVKPKKSALSEPDTPSSPSSPPTNQHIHTGPTPD

SEQ ID NO: 61 - DNA, 840 bp, Pyrenophora tritici-repentis
  misc_feature: Pyrenophora tritici-repentis Pt-1C-BFP
atgcattggactgcgtgggcatcgctgcccgttcttatctttgtgttttggatgtataccagcaccctcggtgcatccttccctaccctcaacaacaagcgcatcctactgttgatagcgcatccagacgacgaagccatgttctttgccccgacattgttggcattgacgcgtccagaacgcggtaaccaagtcaagatactatgcctgagcagtggcgatgctgatgggctgggcgaagtgcgcaagaaagagctagtcaagagcgggttgcagctgggtatcggaagcaaggaggacattctcgtggtcgaggacaaaaacttcccagactcaatgacggtaacatggcacccacgcctgatttcgaatctgctcacaaccgccttcgcaccaaacatgaagtcaatttcgtccgaggaagcaccgcaggcgaccatcgacgccatcatcacctttgacgcacacggcgtgtcgggtcaccccaatcacaaatcgctccatggcggagcgcatactttcttgaaggcgctcatgcatcgtcacagcggatggaactgccccgtcaagctgtacaccctcaccaccacgtcaatattccgcaaatatctcagcttgctggacgcgcctgctacaatcattggcgcaattgtgcgaaagaaggagctcggcggcttccctactccgctcctgttcatcagctcaccggtcggctacaggactgcccaaaaggccatgacaacggcgcacgagagccaaatgcgctggtttcgctggggctggatcaccatgtcgcgctacatggtgctcaacgatctgaagagagagaaggcgggttag

SEQ ID NO: 62 - protein, 279 aa, Pyrenophora tritici-repentis
MHWTAWASLPVLIFVFWMYTSTLGASFPTLNNKRILLLIAHPDDEAMFFAPTLLALTRPERGNQVKILCLSSGDADGLGEVRKKELVKSGLQLGIGSKEDILVVEDKNFPDSMTVTWHPRLISNLLTTAFAPNMKSISSEEAPQATIDAIITFDAHGVSGHPNHKSLHGGAHTFLKALMHRHSGWNCPVKLYTLTTTSIFRKYLSLLDAPATIIGAIVRKKELGGFPTPLLFISSPVGYRTAQKAMTTAHESQMRWFRWGWITMSRYMVLNDLKREKAG

SEQ ID NO: 63 - DNA, 840 bp, Pyrenophora teres
  misc_feature: Pyrenophora teres f. teres 0-1
atgcattggactgcgtgggcatcgctgcccgtcctcatatttgtgttttggatgtataccagcaccctcggtgcctccttccccacgctcaacaacaagcgcatcctactgttgatagcgcatccggacgatgaggccatgttctttgccccgactttgctagcattgacgcgtgcaaaacgcggtaaccacgtcaaaatattgtgtctgagcagtggcgatgccgatgggctgggcgaagtgcgcaagaaagagctagtcaagagtgggttgcagctgggtatcggaagcaaggaggacattctcgtggtcgaggacaaaaacttccccgactcgatgacggtaacatggcacccccgcctgatttcgaacctgctcacaaccgccttcgccccgaacatggagtcgatttcgtccgaggaagcaccgcaggcgaccatcgatgccatcatcacctttgacgcgcatggcgtgtcgggtcaccccaatcacaaatcgctccacggcggagcacatagtttcttgaaggcgctcatgcatcgtcacagcgggtgggactgtcccgtcaagctgtacaccctcaccactacgccaatcttccgtaaatatctcagcttgctggacgcgcctgctacaatcattggtgcaattgtgcgaaagaaggagctcggcgacttccctactccgctcctgtttgtcagctcaccagtcgactacaggactgcccaaaaggccatgacaacagcgcacgagagccaaatgcgctggtttcgctggggctggatcaccttgtcgcgctacatggtgcttaacgatctgaagagagagaaggcgggttag

SEQ ID NO: 64 - protein, 279 aa, Pyrenophora teres
MHWTAWASLPVLIFVFWMYTSTLGASFPTLNNKRILLLIAHPDDEAMFFAPTLLALTRAKRGNHVKILCLSSGDADGLGEVRKKELVKSGLQLGIGSKEDILVVEDKNFPDSMTVTWHPRLISNLLTTAFAPNMESISSEEAPQATIDAIITFDAHGVSGHPNHKSLHGGAHSFLKALMHRHSGWDCPVKLYTLTTTPIFRKYLSLLDAPATIIGAIVRKKELGDFPTPLLFVSSPVDYRTAQKAMTTAHESQMRWFRWGWITLSRYMVLNDLKREKAG

SEQ ID NO: 65 - DNA, 849 bp, Scerotinia borealis
atgcaatggacctacttactcactctccccatcatcacttttgttgcatggcaatacactgtcaccgttgttaattccaaattccctaaacttcgtaacaagaagatatgtttactgatagcgcatcccgatgatgaagccatgttttttgcgccagcaatgcaggcgctcacagacccggaactcggaaatcatgttaagattctctgtttgagcagtggtgatgcagatggattaggggaaactcggaagaaggagcttgttaagagcgggatgcaattgggtttgcgacaagagaatgatgttttcgtctttacgagtccagatttcccagatagtatgacgaagatttgggataaagaaaagatagccaatcttctcgcttccgccttttgccctcctcatacaagaaaaacgaatcttacagttgccccaacagcaaccatcgatgttattttgactttcgattcccaggggatctcttcgcacccaaatcatatctccttataccacggctcacggacccttatcgcatccatgatgcgggatcgtccaggatggcaatgtcctatcgatatttatacccttaccagtgtctcggttctccgaaaatatacatccatattagacacatttagcacaatggtagttgcggccttttcgaaaagacaaacaggcgaccaccctagtccgttgttaatgatgagtggtgtggggcaactcagaactgcccaaaaagctatgacaacagcacatcagagtcagatgaagtggttcagatggggatggattggaatgtcaagatatatggtcataaatgatttcaaattggaaaaggttgttatataa

SEQ ID NO: 66 - protein, 282 aa, Scerotinia borealis
MQWTYLLTLPIITFVAWQYTVTVVNSKFPKLRNKKICLLIAHPDDEAMFFAPAMQALTDPELGNHVKILCLSSGDADGLGETRKKELVKSGMQLGLRQENDVFVFTSPDFPDSMTKIWDKEKIANLLASAFCPPHTRKTNLTVAPTATIDVILTFDSQGISSHPNHISLYHGSRTLIASMMRDRPGWQCPIDIYTLTSVSVLRKYTSILDTFSTMVVAAFSKRQTGDHPSPLLMMSGVGQLRTAQKAMTTAHQSQMKWFRWGWIGMSRYMVINDFKLEKVVI

SEQ ID NO: 67 - DNA, 858 bp, Sclerotinia sclerotiorum
  misc_feature: Sclerotinia sclerotiorum 1980
atgcccaaaatgcaatggacctatttactcacgattcccatcatcacgttcgctgcatggcaatatactgtcacagttgttaactccaaatttccaaaacttcggaacaagaagatatgtttgttaatagcgcatcctgatgatgaggctatgttctttgcgcctgctatgcaagctctcacagatccggaacttggaaatcatgttaaaattctctgtttgagtagtggtgatgcagatgggttaggggaaacaaggaagaaggaacttgttaagagcggaatgcagttgggtttgcgacaagagaatgatgtttttgtttttacaagtccagatttcccagatagtatgacgaagacatgggataaggaaaagatagctaatcttctcgcctctgcattttgccctcctcatacaagaaaagcaaatctttcgactgcgccaactgcaactatcgatgttattttgactttcgacgctcatggggtctcttcacacccaaatcatatttccttataccacggctctcgagccttaatcacatctatgatgcaagatcgtccaggatggcagtgtcctattgatctttataccctcaccagtgtctccgttttccgaaaatacacatccatattagataccttaaacactatggtaatcaccgcattctcaaagaaagaaataggcgatcatccaagtcatttgttaatgatgaatggagtggggcaacttagaactgcgcagaaggccatgacgacagcacataagagtcagatgcggtggtttagatggggatggattggaatgtcaagatatatggtcattaatgatttgaagttagaaaaggttgttgtttaa

SEQ ID NO: 68 - protein, 285 aa, Sclerotinia sclerotiorum
MPKMQWTYLLTIPIITFAAWQYTVTVVNSKFPKLRNKKICLLIAHPDDEAMFFAPAMQALTDPELGNHVKILCLSSGDADGLGETRKKELVKSGMQLGLRQENDVFVFTSPDFPDSMTKTWDKEKIANLLASAFCPPHTRKANLSTAPTATIDVILTFDAHGVSSHPNHISLYHGSRALITSMMQDRPGWQCPIDLYTLTSVSVFRKYTSILDTLNTMVITAFSKKEIGDHPSHLLMMNGVGQLRTAQKAMTTAHKSQMRWFRWGWIGMSRYMVINDLKLEKVVV

SEQ ID NO: 69 - DNA, 735 bp, Septoria nodorum
atgaattggctcggctgggcctctgtgcccctcatcttctttggtttctggatgtacacaagcacgctgagcgcgtcgttccccacgctccgcaacaagcgcatattgctgctcatagcccacccagacgatgaggccatgttctttgcaccgactttgctaggcttgacgcgtccggagaacggcaaccacgtcaaaatcctgtgcctgagcagcggagacgccgacggactgggtgagattcgcaagaaagagttggtcaaaagtggtctcaaactaggtatcggacataaagatgatatattgatcatcgaggacaagtacgctgccggattcgacaccatcatcactttcgacgcacgcggtgtctcctcccatccaaaccacatatcactacacgatggtgcacacaccttcctcaaggccctcatgcaccgacacaccggttgggagtgtccgataaagctgtacaccctcacaacaacgtccatctttcgcaagtaccttggcataatggatgcacccgggacgatcatcgctgcaatcatgcggaagaaagagcttggcgagtttccgacaccgatgctgttcgctagctcaccggtcggttacaggagggcgcagattgcgatgacgacggcgcacgagagtcagatgcgctggttccgctggggctggattaccctgtcgcgttacatgatcatcaacgacctgaagaaggagaaggtaccgtga

SEQ ID NO: 70 - protein, 244 aa, Septoria nodorum
MNWLGWASVPLIFFGFWMYTSTLSASFPTLRNKRILLLIAHPDDEAMFFAPTLLGLTRPENGNHVKILCLSSGDADGLGEIRKKELVKSGLKLGIGHKDDILIIEDKYAAGFDTIITFDARGVSSHPNHISLHDGAHTFLKALMHRHTGWECPIKLYTLTTTSIFRKYLGIMDAPGTIIAAIMRKKELGEFPTPMLFASSPVGYRRAQIAMTTAHESQMRWFRWGWITLSRYMIINDLKKEKVP

SEQ ID NO: 71 - DNA, 777 bp, Septoria tritici
atgacccgctccttccccaccctaaccaacaaacgaatctgtctcctcatcgcccaccccgacgatgaagcgatgttcttcggcccaaccttactctccctgacccgccccgacctaggcaacacggtcgtaatcctctgtctctcctccggcgacgccgacggattgggacacatccgcgtcgacgaactccggaaatcagcgctgttgttgggactgaggagtgcggagcatgtggtggtcgtagacgacccggcgcaattcccggactcgatgacggccaagtgggatgcgaaattgatcgcggggatgttgatgaagtactttgcgccgaaagccacttcaacaccatcgacggaagcgccgacggcaggggtggatgtgttgatcacgttcgacacgggcggagtgtcgggacatccgaatcacatctccctctaccacggagcgaaggcgtttttggaaacactcatgcagcgacatcgaggctgggactcgccgacgaagttgtatacgctgcgaacgacggggacggtgaggaagtatatgagtgtgtttgactcggtggtgacggtggcgttgagtattgggaggaggaaggagaaaggggagtttccgacgccgttgttgacggtgagtctgcctgggggtgtgtttacggcgcagagggcgatggttacggcgcataagagtcagatgaggtggtttcgatgggggtggattgggttgtcgaggtacatggtcattaatgatttggcgaagcagaaggggttttag

SEQ ID NO: 72 - protein, 258 aa, Septoria tritici
MTRSFPTLTNKRICLLIAHPDDEAMFFGPTLLSLTRPDLGNTVVILCLSSGDADGLGHIRVDELRKSALLLGLRSAEHVVVVDDPAQFPDSMTAKWDAKLIAGMLMKYFAPKATSTPSTEAPTAGVDVLITFDTGGVSGHPNHISLYHGAKAFLETLMQRHRGWDSPTKLYTLRTTGTVRKYMSVFDSVVTVALSIGRRKEKGEFPTPLLTVSLPGGVFTAQRAMVTAHKSQMRWFRWGWIGLSRYMVINDLAKQKGF

SEQ ID NO: 73 - DNA, 831 bp, Setosphaeria turcica
atgaattggaccgtttgggcgtcggtgcccgttctcgtcttcgccttctggatgtacgccagcgccctcgcctcaaccttccccacgctcgagaacaaacgcatcgtgctgttgatagcgcatcccgacgatgaggccatgttcttcgccccggctttgctggcattgacgcgtccggagcgtggcaaccacgtcaagatcctgtgcctgagcagcggcgatgccgacgggctgggtgaggtgcgcaagaaagagctagtcaaaagtgggctgcaactgggcatcggcagcaagcaggacattctcgtcatcgaggacaagaactttcccgactccatgacggcaacatggccccctcggctgatcgccaatgtgctcagcactgctttcgccccaaacatgtcgtccacctcccccaaggatgcaccgcaggcgacggtcgacgccatcatcacgtttgacgcacacggcatttcgggccaccccaatcacaagtcgctccatgccggagcccacggctttctcaaggcgctcatgcaccgacacagcgggtgggaatgtcccatcaagctgtacactctgaccacgacctcgatattccgaaaatacctcagcttgctggatgctccggccaccttgattggcgcaattgtccgtaagaaagagcttgggcgctatcccactccactcctgttcgtcagctcgccggccaggtacaggactgcgcaaaaggccatgacgactgcgcatgagagccagatgcgctggtttcgttggggctggatcaccttgtcacgctacatggtgctgaatgatttgaaactagaaaag

SEQ ID NO: 74 - protein, 277 aa, Setosphaeria turcica
MNWTVWASVPVLVFAFWMYASALASTFPTLENKRIVLLIAHPDDEAMFFAPALLALTRPERGNHVKILCLSSGDADGLGEVRKKELVKSGLQLGIGSKQDILVIEDKNFPDSMTATWPPRLIANVLSTAFAPNMSSTSPKDAPQATVDAIITFDAHGISGHPNHKSLHAGAHGFLKALMHRHSGWECPIKLYTLTTTSIFRKYLSLLDAPATLIGAIVRKKELGRYPTPLLFVSSPARYRTAQKAMTTAHESQMRWFRWGWITLSRYMVLNDLKLEK

SEQ ID NO: 75 - DNA, 828 bp, Sphaerulina musiva
atgcacactctctcctggcaaattcccatcctcatcctggcattatggctcttcacagcctacatgaccagagcattcccaaccctcaccggcaagcggatatgcctcgtaatagcccacccagacgacgaagccatgttcttcgctcccacgatccgccatctcacgcgcccagaactcggcaatcaggttgtaatattatgcttcagcagcggcgacgcagacggtctcggccacattcgcaaaaaagaactcgtagcatccgctctcctgctaggtctgcggaaacctgaacatatcgtggtcattgaggacgagaacaattttccggattctatgacgactacgtgggatgcgaaactcatttcgcagactttgatgaagtattttgctccttctcagacgacgacgacgacgacgacgaagaataccctcattgacgtcctgatcacattcgacgaaggcggaatcagtggacatcccaatcacatttcgctgctacatggctgtacgacttttctgagaactttgatgctgaagcatactgggtgggagaaccctgtgaagctgtatacgttgacgacgacgaatatggtgcgaaagtacagtagtgtgttggactcgttggtgagcgtgctggcgattgtgttggggaagaaagaacggggggcttttgccagtccgttgctcatggtgagcttacctggggatgtgagaaaggcgcagcaagcgatgactacggcacacgtgagccagatgcgatggtttcgatgggggtggattggaatttcgcgatacatggttatcaacgatttgaagaagcggtaa

SEQ ID NO: 76 - protein, 275 aa, Sphaerulina musiva
MHTLSWQIPILILALWLFTAYMTRAFPTLTGKRICLVIAHPDDEAMFFAPTIRHLTRPELGNQVVILCFSSGDADGLGHIRKKELVASALLLGLRKPEHIVVIEDENNFPDSMTTTWDAKLISQTLMKYFAPSQTTTTTTTKNTLIDVLITFDEGGISGHPNHISLLHGCTTFLRTLMLKHTGWENPVKLYTLTTTNMVRKYSSVLDSLVSVLAIVLGKKERGAFASPLLMVSLPGDVRKAQQAMTTAHVSQMRWFRWGWIGISRYMVINDLKKR

SEQ ID NO: 77 - DNA, 903 bp, Ustilago maydis
  misc_feature: Ustilago maydis 521
atggcagatcgacccgcaaatctcatgcagatggcgcggatggccattccgcgaccacaattcttcctcgtcgtcttggtcggttcgatcctcgtccagtttctgatcgcaggcctgcgaatccagcatgataacaaagacctggcgatttcggcaagaattcggacactgccctcttcagcgctgctcgtcaccgcccatccggatgacgaggccatgttttttgcgcctgccattcaggcgctcgctgcggcaggcacaacaattttcgccttgtgcctctccaccggtaacgctaccggtctcggtctggaacgcacccaagaactctttggcagctacaatcaactcggtctaccctctaccagagtcaaatacctcgacgatgtacaattgcaagattccatgcaagtcacctggccaaacgactacgtctccaccgttgttgcgaaccacatcgactccatctcgcgctccaaccgcatcgacgcgctcattaccttcgacaagcagggtgtctctggccatctcaatcacattgcaacgtacaatggcacacgcgataccgccgtcgcccgcaacctcactctctacgttctgccctccttggaagtgtgggaaaagtacagctcggtcccatttgccgtttgggagtcgattgcctactccggatacgtgcctgcagctccagcagctggtgcaagctcagagccgtacaagcccgcctcagagatcctcatcctggcgagcccagcccagtacctcgaagcagtacgagccatgttcaagcaccaaacccagctcgaatggtttcgatacctctacatcgtcttcagcagatacatgttctccaacaagttggtgctctggacaccccagctcgaccttgatacagagcaatga

SEQ ID NO: 78 - protein, 300 aa, Ustilago maydis
MADRPANLMQMARMAIPRPQFFLVVLVGSILVQFLIAGLRIQHDNKDLAISARIRTLPSSALLVTAHPDDEAMFFAPAIQALAAAGTTIFALCLSTGNATGLGLERTQELFGSYNQLGLPSTRVKYLDDVQLQDSMQVTWPNDYVSTVVANHIDSISRSNRIDALITFDKQGVSGHLNHIATYNGTRDTAVARNLTLYVLPSLEVWEKYSSVPFAVWESIAYSGYVPAAPAAGASSEPYKPASEILILASPAQYLEAVRAMFKHQTQLEWFRYLYIVFSRYMFSNKLVLWTPQLDLDTEQ

SEQ ID NO: 79 - DNA, 882 bp, Ustilago hordei
ctacgggtcaacgagatcgagctcgggcgtccagagcaccagcctatttgagaacatatacctgctaaacagtaaatacagatacctgaaccacactagctgcgtttgatgcttccacattgcctttaccacgttcgcgtactgcgctggactcgccaaagcgtggatctctgaggctggagcgtatcccttctcctcgctgatcgccgctttcgacgcaggtgggcgaccagaataggtgatagtctcccaaacggcaaagggcaccgagttgaacttttcccatatctccaaagaaggcagcacatagagcggaagctcgcgggagagcgcaaggttgcgcgtgccattgtatgttgcaacgtgatttgtgtgtccagagactcctcgcttgtcgaatgttatcaaagcttcgatggatggaagagtgttgatgtgcttgttgacgagagacgcgatgtggtcgttgggccagacagcttccattgagtcttgaaggagcggatgatcgacatacttgaccttgccagcgggaactccaagtacgttatagctgttaaaaagctccctggtgcgctcagtaccgagaccggcggcgttgccagtggacaagcagagggcgtagatggtagtacctgctgcagcgagcgcttgaatggaaggtgcgaagaacatggcttcatcatctggatgcgctgtgacgagaaggactgatgaaggcagagtgcgagcagagtcatcgaaggtgtctgtggtctggatgcgaacgccactgatcatgaattggacaatgatcgagccgagaaagacgacgaggaagaatgaaggacgcggaatggccatccgcgccatttggagcgggttgagaggctgatccgccat

SEQ ID NO: 80 - protein, 293 aa, Ustilago hordei
MADQPLNPLQMARMAIPRPSFFLVVFLGSIIVQFMISGVRIQTTDTFDDSARTLPSSVLLVTAHPDDEAMFFAPSIQALAAAGTTIYALCLSTGNAAGLGTERTRELFNSYNVLGVPAGKVKYVDHPLLQDSMEAVWPNDHIASLVNKHINTLPSIEALITFDKRGVSGHTNHVATYNGTRNLALSRELPLYVLPSLEIWEKFNSVPFAVWETITYSGRPPASKAAISEEKGYAPASEIHALASPAQYANVVKAMWKHQTQLVWFRYLYLLFSRYMFSNRLVLWTPELDLVDP

SEQ ID NO: 81 - DNA, 999 bp, Verticillium dahliae
  misc_feature: Verticillium dahliae VdLs.17
atggcctggccctgggtcctctcggccgccctggccgccctcgccgccctcctgcccctgttctacatgtacgccgcgacgaccctgcaggccggcctgccgcgcctcacgaacaagcgcatctgcctgctcatcgcccaccccgacgacgaggccatgttcttcgcgcccaccgtcctggccctgacgcgccccgagacgggcaaccacgtcaagattctgtgcctgagctcgggcgacgccgacggcctcggcgagacgcgcaagaaggagctcgtcaagagcggcatggccctcggcctgcgccaggaggacgacgtctttgtcgtcgagagccctgacttccaggactccatgaccctgacctgggacgcccacaagatcgcctccctcctctgcagcgctttcgccccgcagctggcccatgcccccgcgagcagcgccagcccgacctccgcctcggcttccgcggccgccaccgccagcatcgacgtcctcgtcacctttgacgccgccggcgtctcgtcccacccgaaccacatttccctgcacgccggcgcccgcgccttcctcgcccagctgctgcgcgcccgccccggccgccccgcccccgtcgccctctacaccctgacctccgtcccgctgctgcgcaagtacgccgccgtggccgacgccctgccgaccctgctgggctggtacctcgccggcgggcgctccgagggcgagcaacagaaagaggaccagaaccaagacctgccgcaccccaagaccctgctcttcttcaaccagctcaccggcgacggcggcctgccgacggcctggaaggccatgaccacggcccaccggagccagatggtctggttccgctacgcctggatcgtgctgagtcggtacatggtcatcaacgacctccagctggccgaggtcgacgaggcgccgatatcgctgggggccgcggtcggggcgggccatggcgacgttgcgggtgcgggaggatga

SEQ ID NO: 82 - protein, 332 aa, Verticillium dahliae
MAWPWVLSAALAALAALLPLFYMYAATTLQAGLPRLTNKRICLLIAHPDDEAMFFAPTVLALTRPETGNHVKILCLSSGDADGLGETRKKELVKSGMALGLRQEDDVFVVESPDFQDSMTLTWDAHKIASLLCSAFAPQLAHAPASSASPTSASASAAATASIDVLVTFDAAGVSSHPNHISLHAGARAFLAQLLRARPGRPAPVALYTLTSVPLLRKYAAVADALPTLLGWYLAGGRSEGEQQKEDQNQDLPHPKTLLFFNQLTGDGGLPTAWKAMTTAHRSQMVWFRYAWIVLSRYMVINDLQLAEVDEAPISLGAAVGAGHGDVAGAGG

SEQ ID NO: 83 - DNA, 843 bp, Zymoseptoria brevis
atgaacctcctcacaaccctccaattccccgtcctaatcctcgtcctctggctcttcacatcctacatgacccgctccttccccaccctaaccaacaaacgaatctgcctcctaatcgcacacccggacgatgaagcaatgttcttcggcccaaccttactctcccttacccgacccgacctaggcaacacggtcgtaatcctctgtctctcctccggcgacgccgacggcttagggcacatccgcgtcgacgaactccgaaaatccgcgctcttgttgggattgaggagtgcggagcatgtcgtggttgtcgacgacccggcgcaattcccggactcgatgacggccaagtgggatgcaaaattgatcgcgggaatgttgatgaagtactttgctcccaaagccgcttcgacaccatcgatggaagcgccgacggcgggagtagatgtgctgattacgttcgacacgggcggtgtgtcagggcacccgaatcacatctccctctaccatggagcgaaagcatttctcgaacagctcatgcagcgacatcgaggctgggactcgccaacgaagttgtatacgctgcgaacgacgggcatggcgaggaagtatatgagtgtgtttgactcggtggtgacggtcgcattgagcattgggaggaggaaggagaaaggggagtttccgacgccgttgttgacggtgagtttgccgggaggggtgtttacggcgcagagggcgatggttacggcgcataagagtcagatgaggtggtttcgatggggctggattgggttgtcgaggtatatggtcattaatgatttggcgaagcagaaggggttttag

SEQ ID NO: 84 - protein, 280 aa, Zymoseptoria brevis
MNLLTTLQFPVLILVLWLFTSYMTRSFPTLTNKRICLLIAHPDDEAMFFGPTLLSLTRPDLGNTVVILCLSSGDADGLGHIRVDELRKSALLLGLRSAEHVVVVDDPAQFPDSMTAKWDAKLIAGMLMKYFAPKAASTPSMEAPTAGVDVLITFDTGGVSGHPNHISLYHGAKAFLEQLMQRHRGWDSPTKLYTLRTTGMARKYMSVFDSVVTVALSIGRRKEKGEFPTPLLTVSLPGGVFTAQRAMVTAHKSQMRWFRWGWIGLSRYMVINDLAKQKGF

SEQ ID NO: 85 - DNA, 732 bp, Mycosphaerella graminicola
ctcatcgcccaccccgacgatgaagcgatgttcttcggcccaaccttactctccctgacccgccccgacctaggcaacacggtcgtaatcctctgtctctcctccggcgacgccgacggattgggacacatccgcgtcgacgaactccggaaatcagcgctgttgttgggactgaggagtgcggagcatgtggtggtcgtagacgacccggcgcaattcccggactcgatgacggccaagtgggatgcgaaattgatcgcggggatgttgatgaagtactttgcgccgaaagccacttcaacaccatcgacggaagcgccgacggcaggggtggatgtgttgatcacgttcgacacgggcggagtgtcgggacatccgaatcacatctccctctaccacggagcgaaggcgtttttggaaacactcatgcagcgacatcgaggctgggactcgccgacgaagttgtatacgctgcgaacgacggggacggtgaggaagtatatgagtgtgtttgactcggtggtgacggtggcgttgagtattgggaggaggaaggagaaaggggagtttccgacgccgttgttgacggtgagtctgcctgggggtgtgtttacggcgcagagggcgatggttacggcgcataagagtcagatgaggtggtttcgatgggggtggattgggttgtcgaggtacatggtcattaatgatttggcgaagcagaaggggttttag

SEQ ID NO: 86 - protein, 234 aa, Mycosphaerella graminicola
MFFGPTLLSLTRPDLGNTVVILCLSSGDADGLGHIRVDELRKSALLLGLRSAEHVVVVDDPAQFPDSMTAKWDAKLIAGMLMKYFAPKATSTPSTEAPTAGVDVLITFDTGGVSGHPNHISLYHGAKAFLETLMQRHRGWDSPTKLYTLRTTGTVRKYMSVFDSVVTVALSIGRRKEKGEFPTPLLTVSLPGGVFTAQRAMVTAHKSQMRWFRWGWIGLSRYMVINDLAKQKGF

SEQ ID NO: 87 - DNA, 1258 bp, Alternaria solani
gcctcgatactggcgctccggcaggataaacgcctactcaagcttccgccctatctatcggcgctctgcataatcatcggcataggatggctgctggtacttccgttgaacgactactcgcggaggacctatgtctctgagaatgcgcttctccctggacaagtacacacctactttaccggcagcgagcacaatgtcttccgagcctatcgccacgaggtccatggtctgatagacaagcctgtcgcagagtgcgtatgcatactggaacttggaacctgaagctcatcgtgcaacaggcgctcacagcgactcgaagccatcttccgtgaacagaacctcaaagtcgcaacccagcactacaactacaccgtctcgaaccggacaatcgcaaacgaaaacgtctatgctatcctccagggtccccgcgcagacgccaccgaagccattgtcttgatcggagcatggaagaacatggcagacgaggtcaacaactctggcgtcgcattggttctcacattggcgcgctacttcaagcgctggagtctttggagcaaggacatcatcctgcttattcccggcgatagcaccatcggatcgcaagcctgggtcgatgcctaccacgaggcgcacgatacacgttacgttgagagcttgaagatcaagagcggggcattacaaggcgccgtcgcagtcgactatcccgctggtccttggggtcatcggtacgacaaactgcacgtcgtgtacgatggcataaacggccaacttcccaacctggatctgttcaacaccgcagtgcagatcgcctccggccagatgggcatcggctgtgtgatccagcgcatgtgggatcacaaggactcatacaaagagcggcttcagaccatgcttcgaggtatgctctcgcaaggccttggtcacgcaaccgggccccattcgtcctttattccttaccacgtcgacgccgttaccttggtgacggttggggacggctggcatgacgagatgtcgcttggaaaaaccgtcgaatcgctcttccgaagcttgaacaacctcctcgaacacctgcaccagagcttcttcttctaccttttgctacaggataaacgtttcgtcagcattggcacatacctcccctcggccatgctgatcgccatcaacttcagcatcgcggcaatggcgttatgggtaaagagcggacgtaccaccgagcccgtcagcaatctcgctgccaccaaacccaaaaaggaaccga

SEQ ID NO: 88 - protein, 386 aa, Alternaria solani
ASILALRQDKRLLKLPPYLSALCIIIGIGWLLVLPLNDYSRRTYVSENALLPGQVHTYFTGSEHNVFRAYRHEVHGLIDKPVAERSQRLEAIFREQNLKVATQHYNYTVSNRTIANENVYAILQGPRADATEAIVLIGAWKNMADEVNNSGVALVLTLARYFKRWSLWSKDIILLIPGDSTIGSQAWVDAYHEAHDTRYVESLKIKSGALQGAVAVDYPAGPWGHRYDKLHVVYDGINGQLPNLDLFNTAVQIASGQMGIGCVIQRMWDHKDSYKERLQTMLRGMLSQGLGHATGPHSSFIPYHVDAVTLVTVGDGWHDEMSLGKTVESLFRSLNNLLEHLHQSFFFYLLLQDKRFHRGNGVMGKERTYHRARQQSRCHQTQKGTD

SEQ ID NO: 89 - DNA, 2004 bp, Bipolaris maydis
atggcattgctttcatcactactggcgctccggcaagacaaacgcctgctaaagataccaccctatctttctgctctcctcgtcattatcggcataggatggctgctggtacttccgctgaacgagtactcgcgaaggacatacatatcggagaatgcgctgcttccgggacaggtacatacgtactttactggcagtgagcacaacgtcttccgcgcctatcgccatgaggtccacgccttgaaagacagcccggcggcagaacgatcccagaagctcgaggctatcttccgcgaacaaaacctcaaggttgcgacccagcactacaactatactgtctcgaaccgcactatcgcaaacgaaaatgtctatgccatactccaaggtccccgcgccgacgctaccgaagccattgtattgatcggagcctggacaaatatggaaggcgagatgaacaactcgggcgtcgcattggttctcacactggcacgttacttcaagcgctggagcctatggagcaaggacattatcttccttgttactggagatagcacgattggatctcaggcctgggtcgatgcgtaccacgaagggcacgacaagcgatacgtagagagtttgaagatcaagagcggggcattgcagggtgctgttgcggttgactatcccgccggtccatggggtcaccgctatgataagctgcatgtcgtgtacgatgggatcaacggccagcttccgaatctcgatttgatcaacactgcggttcagattgcgtctggtcaactgggcattggttgtgttattcaacgcatgtggaaccacggcgattcctacaaggagcgtctgcagactatgcttcgaggcatgctttcacagggtctcggccacgcaacgggacctcactcctcattcattccgtaccatgtcgatgccattacactggtgacagtcggaaacggctggcatgacgagatgtcgcttggaaagacgattgaatcgctgttccgaagcttgaacaacctccttgagcatttccaccagagtttcttcttctacctcctgttgcaggataagcggttcgttagcatcggcacatacctgccatctgccatgatgattgctatcaattttagcattgccgcaatggcactctgggtcaagagtgggcggatttcagagactcttgaaaaccccgcagctacgaagcccaaagctacgaagcctggaccagctggttccaagtcgggatcggctgaaaaagacgcctctggaacggaagaacctaagaaggaagaacccaagtcagaaagttccaagaaggaagactctaagagtaaagaatcccagaaggaagattctaagaaagaagagcccgccacaaaactcatcgaaaaagacgactcagtcgctgtcgtccccgtcgctgcaacaaaagtaacggaacgccatctcctcctccctctcatcctcgtcctcatcgcccacgcagtcggcctcgttcccctctacctcttcagcaactgggatgcagaccacctccccggcctcttcatcacagcctgcaacatcaccactctgctccccataggcgccactttccttgtctcctggtccgctcccgatatcctaaacacccaggccctgtgtcttctgcaatgcttttcactcttgctgctaggaatgttcctcgctgcgcttgcgacgctgaatttctcgctcagcgttattgtcggtgtggcgtgtgtgccgcttagttttgtgcgcaagagcgcgcataatggggctacaggtgcacagctgctggttcttgcgctgttgaacccttgtttgattgtccagacggggaccagggtcctcggtgcggatttgatggaggtcctagtgcagagtgcgattgggtggcatgtttggggcatgtggacgcaggttgtgttttggttggtttggttccccgcgtggttggtgggtgcagttgttgtgggaacgggtatgtgggattattag

SEQ ID NO: 90 - protein, 667 aa, Bipolaris maydis
MALLSSLLALRQDKRLLKIPPYLSALLVIIGIGWLLVLPLNEYSRRTYISENALLPGQVHTYFTGSEHNVFRAYRHEVHALKDSPAAERSQKLEAIFREQNLKVATQHYNYTVSNRTIANENVYAILQGPRADATEAIVLIGAWTNMEGEMNNSGVALVLTLARYFKRWSLWSKDIIFLVTGDSTIGSQAWVDAYHEGHDKRYVESLKIKSGALQGAVAVDYPAGPWGHRYDKLHVVYDGINGQLPNLDLINTAVQIASGQLGIGCVIQRMWNHGDSYKERLQTMLRGMLSQGLGHATGPHSSFIPYHVDAITLVTVGNGWHDEMSLGKTIESLFRSLNNLLEHFHQSFFFYLLLQDKRFVSIGTYLPSAMMIAINFSIAAMALWVKSGRISETLENPAATKPKATKPGPAGSKSGSAEKDASGTEEPKKEEPKSESSKKEDSKSKESQKEDSKKEEPATKLIEKDDSVAVVPVAATKVTERHLLLPLILVLIAHAVGLVPLYLFSNWDADHLPGLFITACNITTLLPIGATFLVSWSAPDILNTQALCLLQCFSLLLLGMFLAALATLNFSLSVIVGVACVPLSFVRKSAHNGATGAQLLVLALLNPCLIVQTGTRVLGADLMEVLVQSAIGWHVWGMWTQVVFWLVWFPAWLVGAVVVGTGMWDY

SEQ ID NO: 91 - DNA, 2101 bp, Bipolaris oryzae
atggcattgctctgtaagcgcagcgattcataccaaataagaggggccattgctaacaagtccagcatcgttactggcgctccggcaagacaaacgcctgctaaagataccgccctatctttccgctctcctagtcattgtcggcataggatggctcctcgtacttccactgaacgagtactctcggaggacatacatatcggagaatgcgctgcttccggggcaggtacatacgtactttactggcagtgagcacaacgtcttccgcgcctatcgccatgaggtccacgccttgaaagaaagcccggcggcagagtaggtcaattcgccccaacacgcagaccaaagaagctgactgtaccataggcgatcccagaagctcgaggccatctttcgcgaacaaaacctcaaggttgcgacccagcactacaactataccgtctcgaaccgcactatcgcaaacgaaaatgtctatgccatactccaaggcccccgcgctgacgccaccgaagccattgtgctgatcggagcctggacaaacatggatggcgagatgaacaactcgggcgtcgcattagttctcactctcgcacgctacttcaagcgctggagcctgtggagcaaggacatcattttccttgttactggagacagcacaattggttctcaggcctggatcgatgcataccacgaagggcacgacaagcgatacgtagagagtttgaagatcaagagtggggcattgcagggtgctgttgcggttgactatcccgctggtccatggggccaccgctacgataagctacatgttgtgtacgatggaatcaatggccagcttcctaatctcgacttgatcaacactgcggttcagattgcgtccggtcagctaggcattggctgtgttatccagcgcatgtggaaccatggcgattcctacaaggagcgtctgcagactatgctacggggtatgctctcacagggtctgggccacgcaacgggacctcattcctcattcattccgtaccatgtcgacgcaattacgcttgtgacagtcggagatggctggcatgacgagatgtcgcttggaaagaccattgaatcgctgttccgaagcttgaacaaccttctcgagcacttccaccagagtttcttcttctacctcttgttgcaggataagcggttcgttagtatcggcacatacctgccatctgccatgatgattgctatcaacttcagcatcgccgcaatggcactctgggtcaagagtggacgggtttcagagccccttgaaaaccccgcagctacaaagcccaaagccacaacacctaaaccagctggttccaagtcgagctcggctgaaaacgatgcatctgaaacggacaaaccagataaggaagatctcaagagggaagaaaaggaagaaaccaaggaggaagattctaagaaagaagactctaacaaggatgaacccgccacaaaactcatcgaaaaagacgactccgtcgccgtcgtccccgccgctgcgacaaaagtaacagaacgccgcctcctcctccccctcgtcctcgtcctcctcgcccacgcagttggcctcgtccccctctacctcttcagcaactgggacgcagaccacctccccggcctcttcatcacagcctgcaacatcaccaccctcctccccatagccgccactttcctcttctcctggtccgctcccgacatcctcaacccccaggctctgtgtctcctgcaatgcttttcgctgctgttgctgggtatgttccttgctgcgctggccacgctgaatttctcgcttagcgttatcgtcggtgtggcgtgtgtgccgcttagttttgtgcgcaagagcgcgcataatggggctacgggtgcgcagttgctgcttcttgcgctgttgaatccttgtttgattgtgcagacgggaacgaggctcctcggtgcggatttgatggaggtcctggtgcagagtgcgattgggtggcatgtttggggcatgtggactcaggttgtgttttggttggtttggttccccgcgtggttggtgggcgcggttgttgttgcgacgggtatgtgggattattag

SEQ ID NO: 92 - protein, 665 aa, Bipolaris oryzae
MALLSSLLALRQDKRLLKIPPYLSALLVIVGIGWLLVLPLNEYSRRTYISENALLPGQVHTYFTGSEHNVFRAYRHEVHALKESPAAERSQKLEAIFREQNLKVATQHYNYTVSNRTIANENVYAILQGPRADATEAIVLIGAWTNMDGEMNNSGVALVLTLARYFKRWSLWSKDIIFLVTGDSTIGSQAWIDAYHEGHDKRYVESLKIKSGALQGAVAVDYPAGPWGHRYDKLHVVYDGINGQLPNLDLINTAVQIASGQLGIGCVIQRMWNHGDSYKERLQTMLRGMLSQGLGHATGPHSSFIPYHVDAITLVTVGDGWHDEMSLGKTIESLFRSLNNLLEHFHQSFFFYLLLQDKRFVSIGTYLPSAMMIAINFSIAAMALWVKSGRVSEPLENPAATKPKATTPKPAGSKSSSAENDASETDKPDKEDLKREEKEETKEEDSKKEDSNKDEPATKLIEKDDSVAVVPAAATKVTERRLLLPLVLVLLAHAVGLVPLYLFSNWDADHLPGLFITACNITTLLPIAATFLFSWSAPDILNPQALCLLQCFSLLLLGMFLAALATLNFSLSVIVGVACVPLSFVRKSAHNGATGAQLLLLALLNPCLIVQTGTRLLGADLMEVLVQSAIGWHVWGMWTQVVFWLVWFPAWLVGAVVVATGMWDY

SEQ ID NO: 93 - DNA, 1992 bp, Bipolaris sorokiniana
atggcattgctctcatcgttactggcgctccggcaagacaaacgcctgctaaagataccgccctatctttctgctctcctagtcattgtcggcataggatggctgctggtacttccgctgaacgagtactcacggaggacatatatatcggagaatgcgctgcttccgggacaggtacatacgtactttactggcagtgagcacaacgtcttccgcgcctatcgccatgaggtccacgccttgaaagacaggccagcggcagagcgatcccagaagctcgaggccatcttccgcgaacaaaatctcaaggttgcgacacagcactacaactataccgtctcgaaccgcaccatcgcaaacgaaaatgtctatgccatactccaaggaccccgcgccgacgctaccgaagccattgtgctgatcggagcctggacaaacatggacggcgagatgaacaactcgggcgtcgcactggttctcactctcgcacgctacttcaagcgctggagcctatggagcaaggacatcatcttccttgttactggagatagcacgattggatctcaggcctgggtcgatgcgtaccacgaaggacacgacaagcgatatgtagagagtttgaagatcaagagtggggcattgcagggagctgttgcggtcgattatcccgctgggccatggggccaccgctatgataagctacatgtcgtgtacgatggcatcaacggtcagcttccaaatctcgatttgatcaatactgcggttcagattgcatccggtcaactaggcattggctgtgttattcaacgcatgtggaaccacggcgattcctacaaggagcgtctgcagactatgcttcgaggtatgctctcacagggtctgggtcacgcaacgggacctcattcctcattcattccgtaccacgtcgatgccattacgctggtgacagtcggaaacggctggcatgacgagatgtcgcttggaaagacgattgaatctctgttccgaagcttgaacaatcttctcgagcatttccaccagagtttcttcttctacctcttgttgcaggacaagcggttcgttagtatcggcacatacctgccatctgccatgatgattgctatcaactttagcatcgccgcaatggcactctgggtcaagagtggacgggttccagagtcccttgaaaaccccgcagctacaaagcctaaagctacaaagcctaaaccagctgattccacgtcgggctcggctgaaaaggactcctctggaacggacaaaccagacaaggaagatctcaagtgggaagaaaaggaagaaaaggaagaacccaagaaggaagaacccaagaaggaagaacccgccacaaaactcatcaaacaagacggctccctcgctgtcatccccgccgctgcaacaaaagtaacagaacgccacctcctcctccccctcgtcctcgtcctaaccgcccacgcaaccggcctcgttcccctctacctcttcagcaactgggacgcagatcaactccccggcctcttcatcacagcatgcaacatcagcaccctcctacctatagccgccactttcctcgtctcctggtccgctcccgacatcctcaacccccaggctctgtgtctcctgcaatgcttttctttgctattgctaggcatgttcctcgctgcgcttgcgacgctgaatttctcgctcagcgttatcgtcggtgtggcgtgtgtgccgcttagttttgtgcgcaagagcgcgcataacgggattacgggtgcgcagctgctgcttcttgcgctattgaatccttgtttgattgtgcagacggggacgaggctcctcggtgcggatttaatggaggtgctggtgcagagtgcgattgggtggcatgtttggggtatgtggactcaggttgtgttttggttggtttggttccccgcgtggttggtgggtgcggttgttgttgcaacgggtatgtgggattattag

SEQ ID NO: 94 - protein, 663 aa, Bipolaris sorokiniana
MALLSSLLALRQDKRLLKIPPYLSALLVIVGIGWLLVLPLNEYSRRTYISENALLPGQVHTYFTGSEHNVFRAYRHEVHALKDRPAAERSQKLEAIFREQNLKVATQHYNYTVSNRTIANENVYAILQGPRADATEAIVLIGAWTNMDGEMNNSGVALVLTLARYFKRWSLWSKDIIFLVTGDSTIGSQAWVDAYHEGHDKRYVESLKIKSGALQGAVAVDYPAGPWGHRYDKLHVVYDGINGQLPNLDLINTAVQIASGQLGIGCVIQRMWNHGDSYKERLQTMLRGMLSQGLGHATGPHSSFIPYHVDAITLVTVGNGWHDEMSLGKTIESLFRSLNNLLEHFHQSFFFYLLLQDKRFVSIGTYLPSAMMIAINFSIAAMALWVKSGRVPESLENPAATKPKATKPKPADSTSGSAEKDSSGTDKPDKEDLKWEEKEEKEEPKKEEPKKEEPATKLIKQDGSLAVIPAAATKVTERHLLLPLVLVLTAHATGLVPLYLFSNWDADQLPGLFITACNISTLLPIAATFLVSWSAPDILNPQALCLLQCFSLLLLGMFLAALATLNFSLSVIVGVACVPLSFVRKSAHNGITGAQLLLLALLNPCLIVQTGTRLLGADLMEVLVQSAIGWHVWGMWTQVVFWLVWFPAWLVGAVVVATGMWDY

SEQ ID NO: 95 - DNA, 1992 bp, Bipolaris victoriae
  misc_feature: Bipolaris victoriae FI3
atggcattgctctcatcactactggcgctccggcaagacaaacgcctgctaaagataccgccctatctttctgctctcctagtcattgtcggcataggatggttgctggtacttccactgaacgagtactcgcgaaggacatatatatcggagaatgcgctgcttccgggacaggtacatacgtactttactggcagtgaacacaacgtcttccgcgcctatcgccatgaggtccacgccttgaaagacagcccagtgccagagcgatcccagaagctcgaggccatcttccgcgaacaaaacctcaaggttgcgacccagcactacaactataccgtctcgaaccgcaccatcgcaaacgaaaatgtctatgccatactccaaggccctcgcgctgacgctaccgaagccattgtgctgatcggagcttggacaaacatggaaggcgagatgaacaactcgggcgtcgcattggttctcactctcgcacgctacttcaagcgctggagcctatggagcaaagacattattttccttgttactggagatagcacaattggatcccaggcctgggttgatgcataccacgaaggacacgacaagcaatatgtagagagtttgaagatcaagagcggggcattacaaggagctgttgcggttgactatcccgctggtccatggggccaccgctacgataagctgcatgttgtgtacgatggcatcaatgggcagcttcccaatctcgatttgatcaacactgcggtccagattgcatctggtcaactaggcattgactgtgttattcaacgcatgtggaatcacggcgattcctacaaggagcgcctgcagacgatgcttcgaggcatgctttcgcaaggtcttggccacgcaaccggacctcactcctcattcattccgtaccatgtcgatgccattaccctggtgacagtcggaaatggctggcatgacgagatgtcgcttggaaagacgattgaatcgctgttccgcagcttgaacaaccttctcgagcatttccaccagagtttcttcttctacctcttgttgcaggataagcggttcgttagtattggcacatacctgccatctgccatgatgattgctatcaactttagcatcgccgcaatggcactctgggtcaagagtggacgggtttcagagccccttgaaaatcccgcagctacaaagcccaaagctacaaagcccaaaccagctgattccaagtcgagctcggctgaaaaggacgcttctggaacggacaaactagataaggaagatctcgagagggaagaaaaggaagaaaaggaggaaaccaaggagaaagaatccaagaaggaagaacgcgccacaaaagtcatcaaaaaagacgattctatcgccgtcgtccccaccgctgcaacaaaagtaacagaacgccacctcctcccacccctggtcctcgtcctcgtcgcccacgcagttggcctcgtccccctctaccttttcagcaactgggacgcagaccacctccctggcctcttcatcacagcctgcaacatcaccaccatcctccccataggcgctactttcctcttctcctggtccgctcccgagatcctcaacccccaggctctgtgtctcctgcaatgcttttctttgctactgctaggaatgttccttgctgcgctggccacgctgaacttctcgctcagcgttatcgtcggtgtggcatgtgtcccgcttagttttgtgcgcaagaccacgcataatggggctacggctttgcagttactgcttcttgcgcttttgaacccttgtttgattgtgcagacggggacgaggctcatcgatgcggatttgatggaggtgctggtgcagagtgcgattgggtggcatgtttggggtatgtggacgcaggttgtgttttggttggtttggttccccgcgtggttggtgggtgcggttgttgttggaacaggtatgtgggattattag

SEQ ID NO: 96 - protein, 663 aa, Bipolaris victoriae
MALLSSLLALRQDKRLLKIPPYLSALLVIVGIGWLLVLPLNEYSRRTYISENALLPGQVHTYFTGSEHNVFRAYRHEVHALKDSPVPERSQKLEAIFREQNLKVATQHYNYTVSNRTIANENVYAILQGPRADATEAIVLIGAWTNMEGEMNNSGVALVLTLARYFKRWSLWSKDIIFLVTGDSTIGSQAWVDAYHEGHDKQYVESLKIKSGALQGAVAVDYPAGPWGHRYDKLHVVYDGINGQLPNLDLINTAVQIASGQLGIDCVIQRMWNHGDSYKERLQTMLRGMLSQGLGHATGPHSSFIPYHVDAITLVTVGNGWHDEMSLGKTIESLFRSLNNLLEHFHQSFFFYLLLQDKRFVSIGTYLPSAMMIAINFSIAAMALWVKSGRVSEPLENPAATKPKATKPKPADSKSSSAEKDASGTDKLDKEDLEREEKEEKEETKEKESKKEERATKVIKKDDSIAVVPTAATKVTERHLLPPLVLVLVAHAVGLVPLYLFSNWDADHLPGLFITACNITTILPIGATFLFSWSAPEILNPQALCLLQCFSLLLLGMFLAALATLNFSLSVIVGVACVPLSFVRKTTHNGATALQLLLLALLNPCLIVQTGTRLIDADLMEVLVQSAIGWHVWGMWTQVVFWLVWFPAWLVGAVVVGTGMWDY

SEQ ID NO: 97 - DNA, 2095 bp, Bipolaris zeicola
  misc_feature: Bipolaris zeicola 26-R-13
atggcattgctctgtaagtgcggcgattcgtatcaaataagaggggtcattgctaacaagccaagcatcactactggcgctccggcaagacaaacgcctgctaaagataccgccctatctttctgctctcctagtcattgtcggcataggatggttgctggtacttccactgaacgagtactcgcgaaggacatatatatcggagaatgcgctgcttccgggacaggtacatacgtactttactggcagtgaacacaacgtcttccgcgcctatcgccatgaggtccacgccttgaaagacagcccagtgccagagtaggtcaattcgccccgacagacagaccaaagaagctgactgtgccacaggcgatcccagaagctcgaggtcatcttccgcgaacaaaacctcaaggttgcgacccagcactacaactataccgtctcgaaccgcactatcgcaaacgaaaatgtctatgccatactccaaggccctcgcgctgacgctaccgaagccattgtgctgatcggagcctggacaaacatggaaggcgagatgaacaactcgggcgtcgcattggttctcactctcgcacgctacttcaagcgctggagcctatggagcaaagacattattttccttgttactggagatagcacaattggatcccaggcctgggttgatgcataccacgaaggacacgacaagcaatatgtagagagtttgaagatcaagagcggggcattacaaggagctgttgcggttgactatcccgctggtccatggggccaccgctacgataagctgcatgttgtgtacgatggcatcaacgggcagcttcccaatctcgatttgatcaacactgcggtccagattgcatctggtcaactaggcattggctgtgttattcaacgcatgtggaatcacggcgattcctacaaggagcgcctgcagacgatgcttcgaggcatgctttcgcaaggtcttggccacgcaaccggacctcactcctcattcattccgtaccatgtcgatgccattactctggtgacagtcggaaatggctggcatgacgagatgtcgcttggaaagacgattgaatcgctgttccgcagcttgaacaaccttctcgagcatttccaccagagtttcttcttctacctcttgttgcaggataagcggttcgttagtattggcacatacctgccatctgccatgatgattgctatcaactttagcatcgccgcaatggcactctgggtcaagagtggacgggtttcagagccccttgaaaatcccgcagctacaaagcccaaagctacaaagcctaaaccagctgattccaagtcgagctcggctgaaaaggacgcttctggaacggacaaactagataaggaagatctcgagagggaagaaaaggaagaaaaggaggaaaccaaggaaaaagaatccaagaaggaagaacgtgccacaaaagtcatcaaaaaagacgattctatcgccgtcgtccccaccgctgcaacaaaagtaacagaacgccacctcctcccacccctggtcctcgtcctcgtcgcccacgcagttggcctcgtccccctctaccttttcagcaactgggacgcagaccacctccctggcctcttcatcacagcctgcaacatcaccaccatcctccccataggcgctactttcctcttctcctggtccgctcccgagatcctcaacccccaggctctgtgtctcctgcaatgcttttctttgctactgctaggaatgttccttgctgcgctggccacgctgaacttctcgctcagcgttatcgtcggtgtggcatgtgtcccgcttagttttgtgcgcaagaccacgcataatggggctacggctttgcagttactgcttcttgcgcttttgaacccttgtttgattgtgcagacggggacaaggctcctcgatgcggatttgatggaggtgctggtgcagagtgcgattgggtggcatgtttggggtatgtggacgcaggttgtgttttggttggtttggttccccgcgtggttggtgggtgcggttgttgttggaacaggtatgtgggattattag

SEQ ID NO: 98 - protein, 663 aa, Bipolaris zeicola
MALLSSLLALRQDKRLLKIPPYLSALLVIVGIGWLLVLPLNEYSRRTYISENALLPGQVHTYFTGSEHNVFRAYRHEVHALKDSPVPERSQKLEVIFREQNLKVATQHYNYTVSNRTIANENVYAILQGPRADATEAIVLIGAWTNMEGEMNNSGVALVLTLARYFKRWSLWSKDIIFLVTGDSTIGSQAWVDAYHEGHDKQYVESLKIKSGALQGAVAVDYPAGPWGHRYDKLHVVYDGINGQLPNLDLINTAVQIASGQLGIGCVIQRMWNHGDSYKERLQTMLRGMLSQGLGHATGPHSSFIPYHVDAITLVTVGNGWHDEMSLGKTIESLFRSLNNLLEHFHQSFFFYLLLQDKRFVSIGTYLPSAMMIAINFSIAAMALWVKSGRVSEPLENPAATKPKATKPKPADSKSSSAEKDASGTDKLDKEDLEREEKEEKEETKEKESKKEERATKVIKKDDSIAVVPTAATKVTERHLLPPLVLVLVAHAVGLVPLYLFSNWDADHLPGLFITACNITTILPIGATFLFSWSAPEILNPQALCLLQCFSLLLLGMFLAALATLNFSLSVIVGVACVPLSFVRKTTHNGATALQLLLLALLNPCLIVQTGTRLLDADLMEVLVQSAIGWHVWGMWTQVVFWLVWFPAWLVGAVVVGTGMWDY

SEQ ID NO: 99 - DNA, 1875 bp, Blumeria graminis
  misc_feature: Blumeria graminis f. sp. hordei DH14
atgcctggcggtgttaggccgaaagatgggccgttctatatcgggaaactgtcttcgggattccttctgcggcgcaatccctttgttcttaaaatcgccccatttctttcacttttatgtgtacttgttggtgtcgcctggcttctcgctcttccactggacaaatactctcgaagaacttatatatccgagaatgcgctcctgcccggtcaagtgcatacctatttcgccggaagcgaccaggacatatttaggggctacaagcacgaaatcgaaacactggagaatcacaataacattgaggcaaacaatgttctagaagaaatttttaaagcatcgggcttgaaagtcgccagacagagctttcgttactattcagcaggagagcaattcgtcggcgaaaatatatatgccatattacatgctccccggggagatgccacggaagccatagtactagttggagcctggagaaatgtcgaggaagagttcaatcgcagcggaatagcgctacttcttaccctcgccaggtatttcaaaagatggtcgttatggtctaaggacatcatttttcttgtaacaccagagagtaaagctggtccccaagcatgggttgatgcttatcatgatgcacaccaatctcctcaagttgattcacttccactgaaaagtggagcgctccagggtgcattagtgattgactatccatttgatcatcggtttgagtctcttcatattgtgtatgatgggatcaatggaaagctacctaatcttgacttgttcaatacggtagtttctatagcaagcggtcaaatgggaatcggtgtcaaactacagaagatgtggcaacattcagacagctataacgatagacttcagactatgctccgtggtatgataaatcaagggttaggtcacgcgtctggtccacacagcagctttattccctatcacgtcgacgcaatcacactacaaccgtttggaaatggttggcaagatgaaatggcaatggggcgagtgattgagagtgttttcaggagcttgaataatctgcttgaacatctccaccagagctttttcttctacattttgatgcaaacaaatcggtttgttagcatagggacattccttcctagtgccatgcttctggctatcaacttcacgatcatggcaatctctctctggataaaaagtggtactgcagcctctagtgctgaaactacgagtacgaaagataaaatgaccagatcagcattaagccaagatgtaaaggaaaaaattcctagcccagacgaggatggtgtgactgtcgaaagagaactattcctaccactttctgtggtcgctggagtacagtttcttggattactgcccctatatatttttaataatacctctcagacacttctccctttcacatttttcgtttttgcagtattcagcctgttcatgcctttcttaatctcaaccatcttgactcactacgtttcgcttacaatccaacactaccaactaataaaatctttttcgcttcttttgctcggactatttctctcatctctggcaacattgaatttctcgctcgcattctttgttggcctattttctgctcccctggcctttgttagacctcttcctcattatcctaaggtctctctactactcgcggcattgctacacttaatagctcctacaactatagttgctctcggcacttggtactgggggtttggaattagagagatcctgaaggaagctgcgttcggttggaatgtgtggtggatgaatacgcaggtcgtagtatggtgtgtttggtggccggcatggcttcttggtatgttttccttgcacgggaagccaagttcagagttgtga

SEQ ID NO: 100 - protein, 624 aa, Blumeria graminis
MPGGVRPKDGPFYIGKLSSGFLLRRNPFVLKIAPFLSLLCVLVGVAWLLALPLDKYSRRTYISENALLPGQVHTYFAGSDQDIFRGYKHEIETLENHNNIEANNVLEEIFKASGLKVARQSFRYYSAGEQFVGENIYAILHAPRGDATEAIVLVGAWRNVEEEFNRSGIALLLTLARYFKRWSLWSKDIIFLVTPESKAGPQAWVDAYHDAHQSPQVDSLPLKSGALQGALVIDYPFDHRFESLHIVYDGINGKLPNLDLFNTVVSIASGQMGIGVKLQKMWQHSDSYNDRLQTMLRGMINQGLGHASGPHSSFIPYHVDAITLQPFGNGWQDEMAMGRVIESVFRSLNNLLEHLHQSFFFYILMQTNRFVSIGTFLPSAMLLAINFTIMAISLWIKSGTAASSAETTSTKDKMTRSALSQDVKEKIPSPDEDGVTVERELFLPLSVVAGVQFLGLLPLYIFNNTSQTLLPFTFFVFAVFSLFMPFLISTILTHYVSLTIQHYQLIKSFSLLLLGLFLSSLATLNFSLAFFVGLFSAPLAFVRPLPHYPKVSLLLAALLHLIAPTTIVALGTWYWGFGIREILKEAAFGWNVWWMNTQVVVWCVWWPAWLLGMFSLHGKPSSEL

SEQ ID NO: 101 - DNA, 1827 bp, Blumeria graminis
  misc_feature: Blumeria graminis f. sp. tritici 96224
ctagcttcgggattccttctgcggcgcaatccctttgtccttaaactcgccccgtatctttcacttttatgtgtacttgtcggtgtcgcctggcttctcgctcttccgctggacaaatactctcgaagaacgtatatatccgaaaatgccctcctgcccggtcaagtgcatacctatttcgccggaagcgaccaggacatatttaggggctacaagcacgaaatcgaaacactggagaatcacaataacattgaggtaaacaatgttctcgaagatattttcaaagcttcgggcttgaaagtcgccagacagagctttcggtactattctgcgggagagctattcgtcggcgaaaatatatatgccatactacatgctccgcgaggagatgccacggaagccatagtactagttggagcctggaagaatgttgaggacgagtttaatcgcagcggaatagcgctacttcttaccctcgccaggtatttcaaaagatggtctttatggtctaaggacatcatctttctagtaacgccagagagtaaagccggtccccaagcatgggttgatgcttatcatgacgcacaccaatctcctcaagttgattcccttccactgaagagcggagcgctccagggtgcattagtgattgactatccatttgatcatcggtttgaatcccttcatattgtatatgatgggatcaatggaaagctgcctaatcttgacttgttcaatacagtagtatctatagcaagcggtcaaatgggaattggtgtcaaactacagaagatgtggcaacattccgacacctataaagatagacttcagaccatgctccgtggtatgataaatcaagggttaggtcacgcgtctggtccacatagcagcttcattccctatcacgtcgatgcaatcacactacaaccatttggaaatggttggcaagatgaaatggcaatggggcgagtgattgagagtgtatttaggagcttgaataacctacttgaacatctccaccagagctttttcttctacattttgatgcaaacaaatcggtttgttagcataggcactttccttcctagcgccatgcttctgggtatcaacttcacgatcatggcaatttttctctggataaaaagtggtaccacagcttctagtgctgaaactgcgagtacgaaagataaaattcctagattagcattaagcccagacgtgaaggagaaaactcttagcccagacgaggatggtgtgaatgtcgaaagagagttgttcctaccacttgctgtggtcgctggagtacagtttcttggattactgcccctgtatatttttaataatacctctcagacacttctccccttcatatttgttgttttcgcagtattcagcctgtttttgcctttcatgatctcaaccattttgacccactacgtttcacttacaattcaacattaccaactaataaaatccttttcgcttcttttactcggactatttctctcatctctggcaacattgaatttctcgctcgccttctttgttggcctattttctgctcccttggcctttgtcagacctcttcctcattatcctaaggtctctttactactcgcagcatcgctacatttaatagcccctacaactatagtcgctctcagcacatggttctgggggttcgaaatcagagatatcttaaaggaagctgcattcggttggaatgtgtggtggatgaatacgcaggtcgtagtatggtgtgtttggtggccggcgtggcttcttggtatgttttccttgcatgggaagccaagttcagaattataa

SEQ ID NO: 102 - protein, 608 aa, Blumeria graminis
LASGFLLRRNPFVLKLAPYLSLLCVLVGVAWLLALPLDKYSRRTYISENALLPGQVHTYFAGSDQDIFRGYKHEIETLENHNNIEVNNVLEDIFKASGLKVARQSFRYYSAGELFVGENIYAILHAPRGDATEAIVLVGAWKNVEDEFNRSGIALLLTLARYFKRWSLWSKDIIFLVTPESKAGPQAWVDAYHDAHQSPQVDSLPLKSGALQGALVIDYPFDHRFESLHIVYDGINGKLPNLDLFNTVVSIASGQMGIGVKLQKMWQHSDTYKDRLQTMLRGMINQGLGHASGPHSSFIPYHVDAITLQPFGNGWQDEMAMGRVIESVFRSLNNLLEHLHQSFFFYILMQTNRFVSIGTFLPSAMLLGINFTIMAIFLWIKSGTTASSAETASTKDKIPRLALSPDVKEKTLSPDEDGVNVERELFLPLAVVAGVQFLGLLPLYIFNNTSQTLLPFIFVVFAVFSLFLPFMISTILTHYVSLTIQHYQLIKSFSLLLLGLFLSSLATLNFSLAFFVGLFSAPLAFVRPLPHYPKVSLLLAASLHLIAPTTIVALSTWFWGFEIRDILKEAAFGWNVWWMNTQVVVWCVWWPAWLLGMFSLHGKPSSEL

SEQ ID NO: 103 - DNA, 1905 bp, Botryosphaeria parva
  misc_feature: Botryosphaeria parva (strain UCR-NP2)
atggctctgatcgctcccgccatgcttggcctccgccgcgacgcccgcatactgaagatcccgccctacctgtccgccctgtgcatcgtcgtcggcgtcatctggctgttcctgctgccattggacgagtactcgcgccagacctacatctccgagaacgctctgctgcccggccaggtccacacgtatctcggcggcagcgagcacaacatcttccgcgcatacaggcatgaggtgcatgccctcctggacaaggatcaagatgagcgaagccagatcttggaggaactcctgaagaccaccggcctgaagactgcccgccaaaagtacacctacaggacccccggcaaggacacagtgggcgagaatgtgtatggtgtgttgcagggcccgcgcgcggatgctacagaagctgtcgtgctggtcgcctcttgggagacggtcaatggcgagatcaaccagagcggcgttgctctggccctcactctcgcacgctatttcaagagatggtccctctggtccaaggacattatagtgttgatcaccagcgacagcaccgcaggatcccaagcatgggtcgacgcctaccacaatgctcatgacccgaggaaaatcgaggcccttcctctcaagagcggtgctctccagggtgctgttgccattgagtacccggctggcccgtggggtcaccgcttcgataagctccacgttctgtatgacggtatcaacggccagctaccaaatctggatctcttcaacaccgccgtctccattgcaagtggacagatgggcatggggtgcacgttacagcgtatgtgggaccacaaggacagctacgaggaacgactcaagaccatgctccgcggcatgatcagccagggtcttggccatgcctctggtccccacagcgccttcattccttaccacgtagacgctataacgctccagactgtgggagatggatggcatgatgagatgtctctgggaagaacggttgagagcttgttccgcagcttgaacaacctcctcgaacatctgcaccagagtttcttcttctacctcctgatgcaggccaatcgctttgttagcatcggcacttacctgcccagcgccatgctgattgctgtcaatttcaccatcacggctattgcgctctgggttcagagtggacgccctcctcccccgcaggagaagcctgcctctaccgagaccaaggacgagaagaagccagacatgaccctcgtcaaggagggcgacaaggtctctgccgtgccgtccatcatcctcacaactgtcgaacgcagtcttctcctccctcttgccttcgtcagcggcgcccacttccttggactcatcccgctcaacatattcaaccacacctcaggtgaccacctcggcgccgccttcatcctcgtctccatcctcaccctcatcgcaccccctctaacctccttcctcctctcccgcctccaccgcccgaccccgcaagaagcctgccttcttcaatgcctctccctcctcatcctaggcatgttcttctccgcgctcgccacgctcaacttctccctctccttcctcgtcggcctctgcgccgcgcccctcaccttcgtgcggcccgtctccgctcccaacaagcagcgccgcgtcgccctcgccgccctgcagtacgcgctcctcgccgccctcagccccgtcaccgtcgtcggcatcgccagccaggagctgatgggcaagggcttggccgccggccactgggtcgggctggacgccgtcaggcaggtgctggtgcacgccgcgttcgggtggcacgtgtggggcctgtggacgcaggtggtcgtgtggctggtgtggtggccggcgtggttcgtgggcgcggtggtggtgacggggtcgttcttcgggtga

SEQ ID NO: 104 - protein, 634 aa, Botryosphaeria parva
MALIAPAMLGLRRDARILKIPPYLSALCIVVGVIWLFLLPLDEYSRQTYISENALLPGQVHTYLGGSEHNIFRAYRHEVHALLDKDQDERSQILEELLKTTGLKTARQKYTYRTPGKDTVGENVYGVLQGPRADATEAVVLVASWETVNGEINQSGVALALTLARYFKRWSLWSKDIIVLITSDSTAGSQAWVDAYHNAHDPRKIEALPLKSGALQGAVAIEYPAGPWGHRFDKLHVLYDGINGQLPNLDLFNTAVSIASGQMGMGCTLQRMWDHKDSYEERLKTMLRGMISQGLGHASGPHSAFIPYHVDAITLQTVGDGWHDEMSLGRTVESLFRSLNNLLEHLHQSFFFYLLMQANRFVSIGTYLPSAMLIAVNFTITAIALWVQSGRPPPPQEKPASTETKDEKKPDMTLVKEGDKVSAVPSIILTTVERSLLLPLAFVSGAHFLGLIPLNIFNHTSGDHLGAAFILVSILTLIAPPLTSFLLSRLHRPTPQEACLLQCLSLLILGMFFSALATLNFSLSFLVGLCAAPLTFVRPVSAPNKQRRVALAALQYALLAALSPVTVVGIASQELMGKGLAAGHWVGLDAVRQVLVHAAFGWHVWGLWTQVVVWLVWWPAWFVGAVVVTGSFFG

SEQ ID NO: 105 - DNA, 2700 bp, Botrytis cinerea
  misc_feature: Botrytis cinerea BcDW1
atggcgattactttaccccaatttggcgcaactcgtctacgatcatatatcctccgtttacctttattcacacgatgtataatagcaatcatattcatattatggcttgtcagtctgcaatcagcctgggacctccagaaatggggtggcttgtacccgaatgagattgggttacagtcaatgtatcgcacaaataccttcccattgatacatatggggttcatacatatgataatgaacaccattgctttaaccccattgttggagagatttgaggcggaatatgggacattgactactttatcattgtttatgggcccgctgtcgacgatacctgcgctgatatacacactcgtggaaaggggaatcttccatatgaacacaggagtgatgggtgccagtatctgggttttcactctacttgcaatggaagcgcttaagacatataaaacaaacccaaactttgtattgggaacagtacacattccaacatggactacaccaattatcctcacactattcatatcattcttggtaccccatactagcttccttgggcacctttgcgggcttgtttttggctacggatggggcctgggctatctcaaattcttagctccaccagagaagattcttcgatggattgagggaaaaatgaatctcttgggacgattgccacattacgtttcggttgaccaaaaaacctatggaagatatggacttttgcctactaccaataatcccataatctcaccagaaacaaatattgctctgggatttcccgcatctatcgtcttgcgacatgcgccggttcgaaaattaccaccatatctatcctttctttgcatagccattggtgttgcatggctgcttcttctgccattgaacgattattcgagaaatacttatgtttcggagaacgcactgttgccgggccaggtccatacttatttcgcagggagtgatcaaaacgttttccgaggatataagagggaggttgatgctttgggggagagtagcaatgttgaagttaatgataagcttgaggaatttttcaaggccacaggactcaaggttgcgagacaaaagtatgagtacaagtccgcgggtgaagtttacagaggagagaatgtgtatgcgatcttacatgcaccacgcggtgatgccacggaagcaattgtgttggtaggggcttggaggaatattgatggggagttgaatcgaagtggtgttgctttggttcttaccctggcgagatatttcaatcggtggtctttgtggtcaaaagatattatattcttgatcacagcagatagtaaagctggtcctcaggcttgggttgatgcctatcatgatacacacgagtcgccggccattgattcactgcccgtcaaaagcggagctcttcaaggagctgttgtcatcgactatccttttgatcaccgctttgaatcgattcatattgtctacgatggaatcaatggacaacttcctaatctcgacctcttcaataccgtagtctcaatcgccagtggccaaatgggcatcagagtctcactccagaaaatgtggcagcacagcgatagttaccaagatcgactcaagactatgttacgtggtatgataaatcaaggattaggtcatgcttctggacctcatagtagtttcattccatatcatgtggatgcgatcacacttcaaccatttggaaacggctggcaagacgaaatggccatggggagagtaatcgagagtacttttcgaagtttgaataacttattggaacatctccatcaaagtttcttcttctatttactcatgcaagctaatcgcttcgtgagtattggtacatatcttccaagtgccatgttagtggctacaaattttactattatggctattttcctgtgggtgaaaagtggttggcccagtcccaccaagacagaatctgtgttgtcgacggaaaaaggagaggagaaggagaaagctccattggtgattgtggaagccagtggatctaaagctcttatcccacaaaaggatcttcaaacgcgcgaacgcaagcttgcacttcctctcgctgttgtagctggatgtcagttcttggggcttgtccctctttatatattcaaccatacttctaaagccaatctccccgtagtcttctccatcttcctaatcctcaacactttcctccccctagccctctccaccctcctccactcaccctattgcacaacacctactcctcaccaactagccctcatccagtccttctctctccttctcctaggcatgtacctctcctccctcgctaccctcaatttctccctctcaattctcatcggtatcctatcttcccccttatcatacattcgtccattgggtcacagacccattatcgccgctatacttgttgtcctattaggtgttcttgcgccttcgactgtactgtttgctggtgcgaaatattggggtttggatgtgggagatgttttggtggaagcagcgttcggatgggatgttggaggcatgacgacacaggttgtagtttggtgtgtttggtggcccgcgtgggtcgtgggtgggatgttgctttggggaaagcccagagcggaggaagagatggagagtttgaatcagattgcgaatggggtagaaggaaaagtggaagtagcgaatggggtggaaaagaaataa

SEQ ID NO: 106 - protein, 899 aa, Botrytis cinerea
MAITLPQFGATRLRSYILRLPLFTRCIIAIIFILWLVSLQSAWDLQKWGGLYPNEIGLQSMYRTNTFPLIHMGFIHMIMNTIALTPLLERFEAEYGTLTTLSLFMGPLSTIPALIYTLVERGIFHMNTGVMGASIWVFTLLAMEALKTYKTNPNFVLGTVHIPTWTTPIILTLFISFLVPHTSFLGHLCGLVFGYGWGLGYLKFLAPPEKILRWIEGKMNLLGRLPHYVSVDQKTYGRYGLLPTTNNPIISPETNIALGFPASIVLRHAPVRKLPPYLSFLCIAIGVAWLLLLPLNDYSRNTYVSENALLPGQVHTYFAGSDQNVFRGYKREVDALGESSNVEVNDKLEEFFKATGLKVARQKYEYKSAGEVYRGENVYAILHAPRGDATEAIVLVGAWRNIDGELNRSGVALVLTLARYFNRWSLWSKDIIFLITADSKAGPQAWVDAYHDTHESPAIDSLPVKSGALQGAVVIDYPFDHRFESIHIVYDGINGQLPNLDLFNTVVSIASGQMGIRVSLQKMWQHSDSYQDRLKTMLRGMINQGLGHASGPHSSFIPYHVDAITLQPFGNGWQDEMAMGRVIESTFRSLNNLLEHLHQSFFFYLLMQANRFVSIGTYLPSAMLVATNFTIMAIFLWVKSGWPSPTKTESVLSTEKGEEKEKAPLVIVEASGSKALIPQKDLQTRERKLALPLAVVAGCQFLGLVPLYIFNHTSKANLPVVFSIFLILNTFLPLALSTLLHSPYCTTPTPHQLALIQSFSLLLLGMYLSSLATLNFSLSILIGILSSPLSYIRPLGHRPIIAAILVVLLGVLAPSTVLFAGAKYWGLDVGDVLVEAAFGWDVGGMTTQVVVWCVWWPAWVVGGMLLWGKPRAEEEMESLNQIANGVEGKVEVANGVEKK

SEQ ID NO: 107 - DNA, 1908 bp, Cercospora beticola
atggcgctctcagcgcgccttttgaccttgcggcggtcccccattctgctcaaattacccccatacctttcagccatatgcatcctggtcggcatagtatgggtcctgcttcttccgctgaacgactattcgcgacagacgtacatttccgagaacgcgatcctacctggacaggtccatacatacttcggcggcagcgagcataacatcttccgcgcatatcgacaggaagtctacaaccttggtcaaaagagcagagaagagaggctggcaggcatagaacagatcattaaggaaataaaactcaagtgcgcgacacaggaatatgcattcgaggtcgcgggcgagaagatcgagggcaagaatgtctatgggttgcttcaagggccgagggcagatgccacggaagcaatggttctgatcgcagcttggaagaacttcgaaggagagctcaactattctggtgtcgcgctggcattgactctggcgcgatacttcaagcgttggagcatctggtccaaggatatcattctgctcatacctgaggacagcacctatgggtccgaagcatgggtcagcgcataccacagcacaggcacaacccccacatcgagccggaacgtcagcgatttgcctatcaaagctggtgcgcttcagggtgctattgcgctggactatcctgttgggccttggggaaagcgtttcgaaaagttggatgtgctgtatgatggcatcaatggcgcactgcccaacctcgacctcatcaatacggcagtacaaatcgcgtctggccacatgggcatgggatgctctctgcatggcttcacaaagcactctgacaaatatccggaccgactccgcacgattgcctctggcatcctatctcaagcccaaggtgtagccactggtcctcattcagcattcatgccatatcatgtcgatgccatcactctcaagacagtcggagatggctggcacgatgagatgagtcttgggcgagtgactgagagtatcttccgaagtatcaacaacttgctggagcacctgcatcaaagtttcttcttctacatcctgctcaacacgcacaggtttgtgagcattggcagctatctcccagcagctatgctggttgctggcagcttcacgatcaatgcccttgcgctctggatcttgagtgggaaaggacctgtggagaagcctgggaagctggaaagtgcaggtagccagaagccgaagggcgaaaagatggtcaaaatcaaggagggtgacaaagtcgcagttgtcgcaaaggaagagctgcaaagtgttgagagaaagatgttcctacctgcggtcgtggctttggcagtgcatcttatcagtctggtaccactttacctgctcacgcatacgagtaaagcaattttgccgtatgtgtttggtattgtgacaacgagcagctacgtacttcccgcctacatctcgatcctgctggtacgatacctcaaagcgacatcccaacagttgcagaccatgcaggcattttcgctactcttccttggggcaactttctcgacttgggctacactcaacttttcattggcgctgacagtgggcctgttggcatgtccgcttggatttgtgcgtccattgcccttgagatcaaccagcagcagtgacaatcagcggactcttgctatcgcgctgagcattccctcggcattgctatggctggcactctcccctgcgactgctgtctatgcattcagctggtttgtcaagatggacgtcagcgcggtactatttgagattgccaaaggctgggctgcgcagggcgtatggagctgccttgtgctgtggtgcgtctggtggcctggatggacgttagccggagttgtgctcgtcagcggtgctgtgaccaccaagcga

SEQ ID NO: 108 - protein, 636 aa, Cercospora beticola
MALSARLLTLRRSPILLKLPPYLSAICILVGIVWVLLLPLNDYSRQTYISENAILPGQVHTYFGGSEHNIFRAYRQEVYNLGQKSREERLAGIEQIIKEIKLKCATQEYAFEVAGEKIEGKNVYGLLQGPRADATEAMVLIAAWKNFEGELNYSGVALALTLARYFKRWSIWSKDIILLIPEDSTYGSEAWVSAYHSTGTTPTSSRNVSDLPIKAGALQGAIALDYPVGPWGKRFEKLDVLYDGINGALPNLDLINTAVQIASGHMGMGCSLHGFTKHSDKYPDRLRTIASGILSQAQGVATGPHSAFMPYHVDAITLKTVGDGWHDEMSLGRVTESIFRSINNLLEHLHQSFFFYILLNTHRFVSIGSYLPAAMLVAGSFTINALALWILSGKGPVEKPGKLESAGSQKPKGEKMVKIKEGDKVAVVAKEELQSVERKMFLPAVVALAVHLISLVPLYLLTHTSKAILPYVFGIVTTSSYVLPAYISILLVRYLKATSQQLQTMQAFSLLFLGATFSTWATLNFSLALTVGLLACPLGFVRPLPLRSTSSSDNQRTLAIALSIPSALLWLALSPATAVYAFSWFVKMDVSAVLFEIAKGWAAQGVWSCLVLWCVWWPGWTLAGVVLVSGAVTTKR

SEQ ID NO: 109 - DNA, 1860 bp, Colletotrichum fioriniae
  misc_feature: Colletotrichum fioriniae PJ7
atgtcgcgactaatatcttcggcactgtcgttacgtcgcgatccgcgcatcctcaagctcccgccctacatctcgctcgcatgcattctgggcggaatcgcatggctgtttctcttgcctctaaacgattattcccgacgaacttacatttccgagaatgcactgcttccgggtcaagtgcacacgtattttggtggaagtgatcagcatgtgctgagggcgtacaagcatgaggtcaactcggtcagggataagtccaattatgaaatcaatgacaagcttgagggcatcctcaagagcgttggcttgaaggtcggccgccaaaactacacgtacgaatccgctggcgatgtatacaccggagagaacatctacgccattctccaagctcctcgcggtgatgccacggaggctattgtgctcatcgcggcctggaagacggtcgacgacaagtttaatcagaatggccttccactggcgctgacactggcgaggtactttaagcggtggtcactctggtccaaggatatcatcctcgtcattcctccagacagtaggacgggcactcaggcatgggtcgacgcatatcacgactcgcacgactcctcccgtgtgaactcgcttccactcaagtctggcgctttgcagggtgccatcgccatcgactatccgcaagaacaccgtttcgagtccatccatatcatctatgacggcatcaacggccagctccccaacctggacctcatcaactccgtcgtaaatatcgcgggtggacagatgggcatgggcactgccattcaggagatgtggtcacactccgacaagtaccgggaccgactcctcacgatgctccgcggcatgttgaaccaggggctcggccacgcctctggcccgcatagcagcttcatcccctaccacgtagacgccgtgactttgcaaccattcggcgaaggatggcacgatgagatgggaatgggccgccttgtcgaaggaactttccgcagcttgaacaacctgcttgagcacctccaccagagcttcttcttctacctgctcatgcagaaggagaggttcgtgagcattggcacgtacctaccaagtgccatgatcctggccgccagcttcactataaccgcaatttccctctgggtgaagagtggtcatcaggaccagccgtcatctgcgcccagcgtggggttgaaatctgagagtgagggcactgcgtctcaggagatacttgaaactgcaaagggaacaactgcgtcgtcaccttctgcgcccgccgtagaacgcgatctgtttcttcccctgggtctcgtggctgtctgccaatttcttggtgtcgtgccgttatacatcttcaatcatatgcccgcaaacatgctagctggcgcatacacagccttcgccctcgccaactgtgccctgccctttttcatctcctcgctccttaaatccacgtacaaccctacggttcagcaataccagctgatcaagtccttctccctcctcctgctcggcatgttcctctcggctctggcgaccctcaacttctctctcgccttcctggttggtgtcatggccagcccactgtcattcatgcggccgtggccaagccacgccgccgtccgctgggcctgcgccgcttttctccaactcgcctccccgacggcggcgctgtactctgtctcgtcgtactttgatgtcagcatcggcgaggtcctgaaggaagcagctttcggttgggatgtctggggcatgtatacgcctgtcattatttggggggtgtggtggcctgcgtggctcatgggatccgtcatcgtgctcggacagcctacagccaagtcaaaaagtgcatga

SEQ ID NO: 110 - protein, 619 aa, Colletotrichum fioriniae
MSRLISSALSLRRDPRILKLPPYISLACILGGIAWLFLLPLNDYSRRTYISENALLPGQVHTYFGGSDQHVLRAYKHEVNSVRDKSNYEINDKLEGILKSVGLKVGRQNYTYESAGDVYTGENIYAILQAPRGDATEAIVLIAAWKTVDDKFNQNGLPLALTLARYFKRWSLWSKDIILVIPPDSRTGTQAWVDAYHDSHDSSRVNSLPLKSGALQGAIAIDYPQEHRFESIHIIYDGINGQLPNLDLINSVVNIAGGQMGMGTAIQEMWSHSDKYRDRLLTMLRGMLNQGLGHASGPHSSFIPYHVDAVTLQPFGEGWHDEMGMGRLVEGTFRSLNNLLEHLHQSFFFYLLMQKERFVSIGTYLPSAMILAASFTITAISLWVKSGHQDQPSSAPSVGLKSESEGTASQEILETAKGTTASSPSAPAVERDLFLPLGLVAVCQFLGVVPLYIFNHMPANMLAGAYTAFALANCALPFFISSLLKSTYNPTVQQYQLIKSFSLLLLGMFLSALATLNFSLAFLVGVMASPLSFMRPWPSHAAVRWACAAFLQLASPTAALYSVSSYFDVSIGEVLKEAAFGWDVWGMYTPVIIWGVWWPAWLMGSVIVLGQPTAKSKSA

SEQ ID NO: 111 - DNA, 1815 bp, Colletotrichum graminicola
  misc_feature: Colletotrichum graminicola M1.001]
atgtcacggctaatatcctcagccctctcgttgcggcgtgatccacgtatcctcaaactcccgccctacctgtcgttagcatgtattcttggcggcattgcatggctatttctgttgcctctcaatgactactcccgccgaacatatatctccgagaatgcgctgctcccgggccaggtacacacatacttcgggggaagcgaccagaacgtcctacgggcctacaagaacgaggtcaacttggtgaaggacaagtccaactacgagatcaatgacaaactcgagggcattctcaagaacgtaggcttgaaggtcgggcgccagaactacacatacgaatcggctggcgatatctatatgggcgagaatatatacgctattctccaggccccgcgtggtgacgctactgaagcaatcgtgctggttgctgcatggaagacgatcgacgagaaattcaatgtcaacggcgtgccgttggctctgactcttgcacggtacttcaagcggtggtctctctggtccaaggacatcatcctcgtcatccccccggacagcaggacgggagctcaggcctgggttgacgcatatcacgactcgcacgactcgtcccgtgtgagctcgttacctctcaaatccggtgcgttgcagggcgctatcgcaatagacttctcccaggagcgccgctttgaatccatccacatcatctacgatggcatcaatggccaactgccaaatctcgaccttatcaactctgttgtcaacatcgcaggcgggcagatgggcatggggaccgctattcaggaaatgtggtcgcactcggacaaataccaagaccggctacggaccatgcttcgcggcatgctgaaccaggggctcggccacgcctcgggcccgcatagcagcttcatcccataccatgttgatgctatcaccctgcaaccctttggcgaaggttggcatgacgagatgggcatggggcgcttggtcgagggtacgttccgcagcttgaacaacctcctcgaacaccttcatcaaagtttcttcttttacctcctaatgcacaaggagagattcgtcagtattggcacgtacctacctagtgccatgatcctggccgccagttttacaatcactgccatctctctgtgggtgaagagtggccaccaggaagaggcgtgtactgacggttctgggaagaagccaggcccaccaccgcggtcagtatcggcggttgaacgtgatttattcctccccttgggcttggtggccatctgccagtttctgggcgtcatacccctgtacatattcaaccatatgcccgcacatatgctttcaggggcatatacagccttcgcgctcgtcaattgcgctctgccctttctcatttcctcgttgctgacctctacttacaatccgactgtccaacaataccagctcatcaagtctttttccttgcttttgctcggcatgtttctatctgctcttgctactctgaacttctccctggccttcctcgttggcgtcatggctagtccgctctccttcatgcgaccctggccgcaccacttggccgttcgatgggcctgtgccgcgttcctccagctcgcgtctccgacggcggcgctatactccgtgtcgtcgtatttcgacattagcatcggaggggtcctcaaggaggctgcgttcggctgggacgtttggggcatgtatactcccgtcatcatctggggcgtgtggtggcccgcctggcttatggggtccgtcatagtgcttggacagcctgtgtccaaggcgaagaccatgcagctggattag

SEQ ID NO: 112 - protein, 604 aa, Colletotrichum graminicola
MSRLISSALSLRRDPRILKLPPYLSLACILGGIAWLFLLPLNDYSRRTYISENALLPGQVHTYFGGSDQNVLRAYKNEVNLVKDKSNYEINDKLEGILKNVGLKVGRQNYTYESAGDIYMGENIYAILQAPRGDATEAIVLVAAWKTIDEKFNVNGVPLALTLARYFKRWSLWSKDIILVIPPDSRTGAQAWVDAYHDSHDSSRVSSLPLKSGALQGAIAIDFSQERRFESIHIIYDGINGQLPNLDLINSVVNIAGGQMGMGTAIQEMWSHSDKYQDRLRTMLRGMLNQGLGHASGPHSSFIPYHVDAITLQPFGEGWHDEMGMGRLVEGTFRSLNNLLEHLHQSFFFYLLMHKERFVSIGTYLPSAMILAASFTITAISLWVKSGHQEEACTDGSGKKPGPPPRSVSAVERDLFLPLGLVAICQFLGVIPLYIFNHMPAHMLSGAYTAFALVNCALPFLISSLLTSTYNPTVQQYQLIKSFSLLLLGMFLSALATLNFSLAFLVGVMASPLSFMRPWPHHLAVRWACAAFLQLASPTAALYSVSSYFDISIGGVLKEAAFGWDVWGMYTPVIIWGVWWPAWLMGSVIVLGQPVSKAKTMQLD

SEQ ID NO: 113 - DNA, 1863 bp, Colletotrichum gloeosporioides
  misc_feature: Colletotrichum gloeosporioides Cg-14
atgtcacgactgatatcttcggccctctcgttgcgacgcgatccacgcatcctcaagcttccgccctacatttctctggcctgcatcctcggtggtattgcttggctgttcctcctgccgctcaacgactactcccgtagaacctacatttccgagaatgcgcttcttcccggtcaggtacacacctatttcggaggaagcgaccagaacgtattgcgggcgtataagcaagaggtcaactcggttagggacaagtccaactacgaaattaatgacaagctggaaggtatcctgaagaacgtcgggctcaaagtcggtcgccaaaactacacgtacgagtcggccggcgacatttactcaggcgagaacatttacgccatcctacaagccccacgcggcgatgcgacggaagcgattgtgttggtagcagcttggaggacggtcgatggccacttcaatcaaaatggcattccgctagcattgaccctggcccggtacttcaagaggtggtctctatggtccaaagacattatcctggttgttccccccgacagcagaacaggaacccaagcctgggtcgacgcctaccacgactcccatgactccgccagtgtgaactctctacctcttaagtccggcgccctccaaggcgccattgccattgattatccccaggaacatcgattcgagtccatccacatcatttacgacggcatcaatggccagcttccaaacctggatctcatcaactctgtcgtcaatattgccggaggccagatgggtatgggaactgccattcaagagatgtggacgcactcggacaagtaccaggaccgtctgcgtactatgcttcgaggcatgctgaatcaaggcctgggacacgcctctggcccccacagcagcttcataccttaccacgtcgacgcggtcacactgcagcctttcggtgagggatggcatgatgagatgggcatgggccgtacgatcgaaggcactttccgcagtctgaacaaccttctcgaacacctccatcagagtttcttcttctatctgctcatgcataaagagaggttcgtcagcatcggcacctatctgcctagcgccatgatcttggcagcaagcttcacaatcactgccatttcgctgtgggtgaaaagcggccatcaggaacagcctcccattgtggtcaagtcagccatcaagtcagaaggcgaagtccccgcgaatgataagccttccgaagacgctttgcgggagacagcgaaacacacacttcccactagagccgttgagcgggatctattcctgccactcggtgtcgtggccatctgccagttcctgggcgtgattccgctgtacgtcttcaaccacatgcccgcaagtatgcttgctggggcgtacacggtcttttcgctcactaattgtgctctacccttccttatctcttcgctgatgacatccgtctacaaccctacggttcagcaataccagctcatcaagtcattctccctacttttgctgggcatgtttctctccgctctagccacccttaacttctctctggcctttcttgtgggggttatggccagtccactctccttcatgcacccatggccgcaccatcctgccattcggtgggcttgcgcggctttccttcaactcgtctcacctacggcagctctgtactccgtctcgacttacttcgatattagcattggggaggtcctcaaagaggcggctttcggttgggacgtttggggcatgtacacgcctgtcatcatctggggtgtgtggtggcctgcttggctgatgggttcggttattgtcctcgggaaccctgcgtcctcagcgaaaagggcttag

SEQ ID NO: 114 - protein, 620 aa, Colletotrichum gloeosporioides
MSRLISSALSLRRDPRILKLPPYISLACILGGIAWLFLLPLNDYSRRTYISENALLPGQVHTYFGGSDQNVLRAYKQEVNSVRDKSNYEINDKLEGILKNVGLKVGRQNYTYESAGDIYSGENIYAILQAPRGDATEAIVLVAAWRTVDGHFNQNGIPLALTLARYFKRWSLWSKDIILVVPPDSRTGTQAWVDAYHDSHDSASVNSLPLKSGALQGAIAIDYPQEHRFESIHIIYDGINGQLPNLDLINSVVNIAGGQMGMGTAIQEMWTHSDKYQDRLRTMLRGMLNQGLGHASGPHSSFIPYHVDAVTLQPFGEGWHDEMGMGRTIEGTFRSLNNLLEHLHQSFFFYLLMHKERFVSIGTYLPSAMILAASFTITAISLWVKSGHQEQPPIVVKSAIKSEGEVPANDKPSEDALRETAKHTLPTRAVERDLFLPLGVVAICQFLGVIPLYVFNHMPASMLAGAYTVFSLTNCALPFLISSLMTSVYNPTVQQYQLIKSFSLLLLGMFLSALATLNFSLAFLVGVMASPLSFMHPWPHHPAIRWACAAFLQLVSPTAALYSVSTYFDISIGEVLKEAAFGWDVWGMYTPVIIWGVWWPAWLMGSVIVLGNPASSAKRA

SEQ ID NO: 115 - DNA, 1791 bp, Colletotrichum higginsianum
atgtcgcgactaatatcttcggctctatcgttgcgacgtgatccacgcatcctcaagctgccaccctacatctcgttagcttgcattctcggcggcattgcatggctgtttctgcttcctctcaacgactactcccgacgaacatatatatctgagaatgcgctgctccctggacaagtgcacacatactttgggggtagcgaccagaatgtcttgcgggcgtacaggcaagaggtcagctctgtcagggacaagcccaattacgagattaacgacaaactcgagggcattctcaaaaacgtgggactgaaggttggacgtcagaattacacatacgaatcagccggcgacatctatacgggcgagaacatttacgccattctccaggctccgcgtggcgacgccacagaagcaatcgtgctggtagctgcctggaagacggttgacgacaggttcaatgtcaacggtgtgccgttggctctgaccctcgcgagatacttcaagcggtggtccctctggtccaaggacatcatcctccttttccccccggacagcaggacagggacccaggcttgggttgacgcctaccacgactcacacgactcgtcccgcgtgagctctctgcccctcaagtccggcgcgctgcagggcgctatcgccatcgacttctcacaggaataccgcttcgagtctatccacatcatctacgacggcatcaacggccaactgccgaatctcgatctcatcaattccgtcgtgaatatcgcaggcggacagatgggtatgggcactgcgatccaggagatgtggtcgcactcggacaagtaccaggaccgactccggaccatgcttcgtggcatgcttaaccaaggtctcggccacgcctcgggcccgcatagcagttttatcccgtaccatgttgacgctgtcactctgcagccttttggtgaaggctggcacgacgagatgggtatgggccgcttggtcgaggagagattcgtcagcattggcacgtacctgcccagtgccatgattctcgccgcgagcttcaccattactgccatctctttgtgggtgaagagtggccagcaggaagagggttcaggtgtgacgagcacaacaactacatccaagagcgtgattatgccttcacaaggatctgccgaaggtgctataactgtgtcagactcaccaacaccatctgcaccagctgtcgaacgtgacttgttccttcctttgggcctagtggccatctgtcagttcctgggcgttgtgccgctatacatcttcaaccacatgcccgcaagcatgctttcgggggcctacacggccttcgcgctcgtcaactgcgccctccctttccttgtctcctcgctgcttacctcaacctacaacccaaccgtccagcagtaccagcttatcaagtccttttccttgctgctgctcggcatgtttctctccgccctagcaaccctcaatttttccttggccttcctcgttggcgtcatggctagtccgctgtccttcatgcgaccctggccgagccacccacccgttcgctgggtctgcgctgcctcccttcaactcgcctccccgacggcggcactttattccgtctcatcatatttcaacattagcatcggcgaggttctcaaggaggctgcgttcgggtgggacgtttggggcatgtacactcccgtcatcatctggggtgtatggtggcccgcctggctcatggggtccgtcattgttcttggacagccagcgcccaaggtgaaaaagtctgtatag

SEQ ID NO: 116 - protein, 596 aa, Colletotrichum higginsianum
MSRLISSALSLRRDPRILKLPPYISLACILGGIAWLFLLPLNDYSRRTYISENALLPGQVHTYFGGSDQNVLRAYRQEVSSVRDKPNYEINDKLEGILKNVGLKVGRQNYTYESAGDIYTGENIYAILQAPRGDATEAIVLVAAWKTVDDRFNVNGVPLALTLARYFKRWSLWSKDIILLFPPDSRTGTQAWVDAYHDSHDSSRVSSLPLKSGALQGAIAIDFSQEYRFESIHIIYDGINGQLPNLDLINSVVNIAGGQMGMGTAIQEMWSHSDKYQDRLRTMLRGMLNQGLGHASGPHSSFIPYHVDAVTLQPFGEGWHDEMGMGRLVEERFVSIGTYLPSAMILAASFTITAISLWVKSGQQEEGSGVTSTTTTSKSVIMPSQGSAEGAITVSDSPTPSAPAVERDLFLPLGLVAICQFLGVVPLYIFNHMPASMLSGAYTAFALVNCALPFLVSSLLTSTYNPTVQQYQLIKSFSLLLLGMFLSALATLNFSLAFLVGVMASPLSFMRPWPSHPPVRWVCAASLQLASPTAALYSVSSYFNISIGEVLKEAAFGWDVWGMYTPVIIWGVWWPAWLMGSVIVLGQPAPKVKKSV

SEQ ID NO: 117 - DNA, 1833 bp, Colletotrichum orbiculare
  misc_feature: Colletotrichum orbiculare MAFF 240422
atgtcgcgattaatatcttcggctctctcattgcgacgtgatccacgcatcctcaagctcccgccatatctgtccctggcctgcgtcctgggcggcatcgcgtggttgttcctcctacccctcaacgactattcgcgaagaacatacatctccgaaaacgcattgcttcccgggcaggtgcacacctactttgggggtagcgaccagagtgtcctgcgcgcctacaaacatgaggtcaactccgtgaaggacagatcgaaccatgaaattaacgacaagcttgagaatattctcaaaaacgtcgagttgaaagtcggtcgccagaattacacattcgaatcggccggcgacgtgtactcgggcgagaatatatacgcaatccttcaagccccgcgcggcgacgcgacggaagctattgtgctggtggcagcttggaggactgtcgatgggcatttcaatcagaacggtattcccctcgcactgactctggcgagatatttcaagcggtggtcgttgtggtccaaggatataatcctcgtcataccccccgacagcagaacaggaactcaggcatgggttgacgcctaccatgactcccacgactcgaggctcgtaaactccctgcccatcaagtcaggtgcattacaaggggccattgccatcgactacccccacgagcaccgtttcgagtctgtccacatcatctatgatggcatcaatggccagcttccgaacctagatctcatcaattccgtcgtcaacattgcaggcggacagatgggcatgggcacagcgatccaggagatgtggtcgcactctgacaagtaccaagaccgcctgcgtaccatgcttcgaggcatgttgaaccagggactcggacacgcctcaggtccccacagcagttttattccctaccatgttgatgctgtcaccttgcagccttttggagaaggctggcatgacgagatgggcatgggccgcaccattgagggtaccttccgcagtctgaacaaccttctcgagcacctgcatcagagcttctttttctacctgctcatgcacaaggagagattcgtcagtatcggcacgtatcttccgagtgctatgatcctggctgccagctttactatcaccgccatctcactatgggtaaaaagcggccaccagaatcagacaacggtcgactcaccggccgagaagcaaggcagcaactcgccccagaagccgtcccataaacccgtaaaagagacgaaagcctcgtgtgtcccagcggctgagcgagatctgttcctgccgcttgggctcgtcactgcttgtcagtttttgggcgtgattccgctctacgttttcaatcatgtgcctgcaaacctgctgtcgtgggcatacacggcttttgcgctcatcaattgtgtgcttcccctcctcatctcctcgctgttgacttccgtatacaaccccaccatccagcagtatcagctcatcaagtcattctcgcttcttttgctgggcatgttcctctcagcccttgcgacgctcaacttttcgttggccttcctcgtcggggtcatggcaagcccactttccttcatgcagccctggccacgtcagggcgccgtccgctgggcgtgtgccgcttttcttcaattggcatctcccactgccgcgctttactcaatctctaattactttgaactaagcattggcgaggtacttaaggaggcagcattcggatgggacgtctggggcatgtatacgccggtggtcatctggggtgtgtggtggccggcctggctgatgggttccgtcatcgttctcgggcaacctgcagcctag

SEQ ID NO: 118 - protein, 610 aa, Colletotrichum orbiculare
MSRLISSALSLRRDPRILKLPPYLSLACVLGGIAWLFLLPLNDYSRRTYISENALLPGQVHTYFGGSDQSVLRAYKHEVNSVKDRSNHEINDKLENILKNVELKVGRQNYTFESAGDVYSGENIYAILQAPRGDATEAIVLVAAWRTVDGHFNQNGIPLALTLARYFKRWSLWSKDIILVIPPDSRTGTQAWVDAYHDSHDSRLVNSLPIKSGALQGAIAIDYPHEHRFESVHIIYDGINGQLPNLDLINSVVNIAGGQMGMGTAIQEMWSHSDKYQDRLRTMLRGMLNQGLGHASGPHSSFIPYHVDAVTLQPFGEGWHDEMGMGRTIEGTFRSLNNLLEHLHQSFFFYLLMHKERFVSIGTYLPSAMILAASFTITAISLWVKSGHQNQTTVDSPAEKQGSNSPQKPSHKPVKETKASCVPAAERDLFLPLGLVTACQFLGVIPLYVFNHVPANLLSWAYTAFALINCVLPLLISSLLTSVYNPTIQQYQLIKSFSLLLLGMFLSALATLNFSLAFLVGVMASPLSFMQPWPRQGAVRWACAAFLQLASPTAALYSISNYFELSIGEVLKEAAFGWDVWGMYTPVVIWGVWWPAWLMGSVIVLGQPAA

SEQ ID NO: 119 - DNA, 1944 bp, Colletotrichum sublineolum
atgaaggctgtccttctacttcccggagctgccgcaacagtcattgctatgtcgcgactaatatcttcagccctctctttgcgccgcgatccacgtatcctcaaactaccgccctacctgtcgttagcatgcattcttggcggaattgcatggctatttctgttgcctctcaacgactactcgcgtcgaacatatatctccgagaatgcgctgctcccaggccaagtacacacatactttgggggaagcgaccagaacgtcctgcgggcctacaagaacgaggtcaacctggtcaaggacaagtccaactacgatcgcttttactgcaggatcaatgacaaactcgagggcattctcaagaacgtcggcttgaaggttgggcgtcagaactacacatacgagtcagccggcgatatctatacgggcgagaatatatacgccattctccaggctccgcgtggtgatgctactgaagccatcgtgctggttgctgcatggaagacagttgacgaccaatttaacgtcaacggcgtgccgctggccctgactcttgcgcggtacttcaagcggtggtcgctctggtccaaggacatcatcctcgtcatccccccagacagcaggacaggcacccaggcctgggttgacgcataccacgactcgcacgactcgtcccgcgtgagctcgctgcccctcaaatccggcgcattgcagggtgctattgccatagacttctcacaagagcgccgttttgaatccatccacgtcatctacgatggcatcaatgggcagctgccaaatctcgaccttatcaactctgttgttaacatcgcaggcggacagatgggtatggggaccgctattcagcgaatgtggtcgcactcggacaaatatcaagaccggctacggaccatgcttcgcggcatgttgaaccaggggcttggccacgcctcgggcccgcatagcagcttcatcccatatcatgttgatgctgttaccctgcagccctttggcgaaggttggcatgatgagatgggcatggggcgcctggtcgagggtactttccgcagtttgaacaacctcctcgaacacctccatcaaagtttcttcttttacctcctgatgcacaaggaaaggtttgtcagtattggcacgtatctacctagtgccatgatcctggctgccagttttacaatcactgccatctctctgtgggtgaaaagtggctaccaggaagaggattcaggtccagagcgcatagcggccagggctgagaatgaaacgacgtcttcggaagggtctatcaaaggatctacgatgaagcctggcctaccaccgcgatctgtaccggcggttgaacgtgatttatttcttcccttgggcttggtggccatctgccagttcctgggcgtcatacctctgtacatcttcaaccatatgcccgcaaatatgctttcaggggcatatacggccttcgcactcgtcaactgcgccctgccctttctcatctcttcgttgttgacctctacttacagcccgactgtccaacaataccagctcatcaagtctttttccttgcttttgctcggcatgttcctgtctgctcttgccactcttaacttctccctggccttcctcgttggcgttatggctagcccgctctctttcatgcggccctggccccgtcgctcggccgtccggtgggcctgcaccgggttcctccagctcgcttccccgacggcggccctctactccgtttcgtcgtatttcgacattagcatcggcggggtccttaaggagactgcgttcggatgggacgtttggggcatgtacactcccgtcatcatctggggggtttggtggcccgcctggctcatgggatccgtcattgtgcttggacagcctgtgtccaaggcggagactatacggctagatcagaaggcttga

SEQ ID NO: 120 - protein, 647 aa, Colletotrichum sublineolum
MKAVLLLPGAAATVIAMSRLISSALSLRRDPRILKLPPYLSLACILGGIAWLFLLPLNDYSRRTYISENALLPGQVHTYFGGSDQNVLRAYKNEVNLVKDKSNYDRFYCRINDKLEGILKNVGLKVGRQNYTYESAGDIYTGENIYAILQAPRGDATEAIVLVAAWKTVDDQFNVNGVPLALTLARYFKRWSLWSKDIILVIPPDSRTGTQAWVDAYHDSHDSSRVSSLPLKSGALQGAIAIDFSQERRFESIHVIYDGINGQLPNLDLINSVVNIAGGQMGMGTAIQRMWSHSDKYQDRLRTMLRGMLNQGLGHASGPHSSFIPYHVDAVTLQPFGEGWHDEMGMGRLVEGTFRSLNNLLEHLHQSFFFYLLMHKERFVSIGTYLPSAMILAASFTITAISLWVKSGYQEEDSGPERIAARAENETTSSEGSIKGSTMKPGLPPRSVPAVERDLFLPLGLVAICQFLGVIPLYIFNHMPANMLSGAYTAFALVNCALPFLISSLLTSTYSPTVQQYQLIKSFSLLLLGMFLSALATLNFSLAFLVGVMASPLSFMRPWPRRSAVRWACTGFLQLASPTAALYSVSSYFDISIGGVLKETAFGWDVWGMYTPVIIWGVWWPAWLMGSVIVLGQPVSKAETIRLDQKA

SEQ ID NO: 121 - DNA, 1869 bp, Diaporthe ampelina
atgtcgcggctcctatctggcgccctgcgcctccgacgcgacccgcgcctcctgaagctgccgccctacatctccctgctttgtatcgtcgtcggcgtcgcttggctgctcatgctcccacaaaacgactactcgcgacggacatacatctcggagaacgcgctgctgccgggccaggtgcacacgtactttggcggcagtgaccagaacgtcttccgggcgtacaaacacgaggtggacgggctcgtggggcggagcaacatagaggtcaacgacgggctcgagggcatcttcaaggcggtgggactcaaggtgggccggcagaactttacgtactcgagctcggggaacacgtatgctggcgagaacgtttacgccatcctgcaagcgccgcggggcgacgccaccgaggccatcgtgctggtggccgcgtgggagaacgcccggggcgagctcaacaagcggggcgtcgcgctgctgctgacgctggcgcggtacttccggcggtggtcgctgtggtccaaagacatcatcctcgtggtgccgcccgacagcctggcgggcccgcaggcgtgggtggacgcttaccacgacgcccacgacacgcggcgcatcgacccgctgcccatgaagtccggggcgctgcagggcgccatcgcactcgactacgcgcaggagcaccgtttccattcggttcacatcgtgtacgacggcatcaatgggcagctgcccaatctcgacctcatcaacagcgtcgtaaatatcgcaggtggccagatgggcatcggcgtgtcgatccaggagatgtggtcgcacggcgactcatacgacgacaggctgcgcaccatgctgcgcggcatgatgaagcaggggctcggcatggcgtccggcccgcacagctgcttcatcccctaccacgtcgacgccatcaccctccggccctacggcgagggctggcaggacgagatggccatgggccgcgtcgtcgagggcaccttccgatccctcaacaacctgctcgagcacctgcaccagagcttcttcttctacctgctcatgcacaaggaccgcttcgtcagcataggcacctacctgccgagcgccatgttggtcgcggccaacttcacaatcatatccattgcgctgtgggtgaagagcggacaggccgggggggttggggaggccgagaagccggcagagacgaccagaaaggagaaaagtgtggcgaacgaaaagggaccggccgatgctatcttgacaccagctacggagagggatttgctcctccctctggtttttgtcgcggggagccaatttctgggagttgtcccattctacatcttcaacaacgtactcgagggcatgcacaccccagtattcgtcctcttcacaattctcaacgccgccctcccacacctcgcctcccacctgctaacggccaagttccgccccacggcgcaacaatatgccctgatgcagtccttctcccttctcctgctgggcatgttcctctccacgctggcgacgctcaacttctcgctctcgctgatggttgggctcctctcggtgccgctgtcgttcgtgcggccgtggccctcgctcccggccgcgaggtgggcctcggcgctgctcctccacctgctggcgccgacggcggtgctggcgctgtggagcacgtactggtcggcgtgggccggccttggcgaggtgctgcgcgaggcggcgttcggatggcacgtctggagcatgtacacgagcgttgtcgtctggggcgtctggtggcccgcgtggcttgtcggcggcgtcgctgtgttggggcggccgggcatggaggtggtagaagagaagaagaagaaggctggggaatga

SEQ ID NO: 122 - protein, 622 aa, Diaporthe ampelina
MSRLLSGALRLRRDPRLLKLPPYISLLCIVVGVAWLLMLPQNDYSRRTYISENALLPGQVHTYFGGSDQNVFRAYKHEVDGLVGRSNIEVNDGLEGIFKAVGLKVGRQNFTYSSSGNTYAGENVYAILQAPRGDATEAIVLVAAWENARGELNKRGVALLLTLARYFRRWSLWSKDIILVVPPDSLAGPQAWVDAYHDAHDTRRIDPLPMKSGALQGAIALDYAQEHRFHSVHIVYDGINGQLPNLDLINSVVNIAGGQMGIGVSIQEMWSHGDSYDDRLRTMLRGMMKQGLGMASGPHSCFIPYHVDAITLRPYGEGWQDEMAMGRVVEGTFRSLNNLLEHLHQSFFFYLLMHKDRFVSIGTYLPSAMLVAANFTIISIALWVKSGQAGGVGEAEKPAETTRKEKSVANEKGPADAILTPATERDLLLPLVFVAGSQFLGVVPFYIFNNVLEGMHTPVFVLFTILNAALPHLASHLLTAKFRPTAQQYALMQSFSLLLLGMFLSTLATLNFSLSLMVGLLSVPLSFVRPWPSLPAARWASALLLHLLAPTAVLALWSTYWSAWAGLGEVLREAAFGWHVWSMYTSVVVWGVWWPAWLVGGVAVLGRPGMEVVEEKKKKAGE

SEQ ID NO: 123 - DNA, 3696 bp, Diplodia maydis
atgtcgacaccgacgctccagtccttcagcgctgggcgcgcgaagtcatacgtctacaaactgccgcttttcacaaggctcgtcgtgtctataatagtggcgacgtgggccgcgggcgtggtttctgggtcgagatgggacatgcaggcgtggggcgcgctggtgccggacgaggtcggaatcacgagccgtgagtgctgccttccactgggatcctgcgatggacggataggtcacccacggaggggattagactggtgggcgtgtaacgcgataactgacagccttggccagtgtaccgaacgaacacgtacccgctgatacacctcaacttcctgcacatgatcatgaacgtcctggccttgacgcctcttctggagcgattcgagagtgaatacgggacattgaccagcttggcgctgttctttggacgtgagcaagactgcattccaccccgcgggccgagactttgccgtcagcaagctaaccacaccacaccacaaacgcacagccttctcgaccttcccagcgttcctctacatcctcatggaaaaagtgatccttcactccaacaacggcgtcatgggcgcgagcgtgtggttcttcctgctgctgggcgcggaggcgatgcgcacgtaccggacgaacccgcacttcaccatcgcgacgtacaacatcccgacgtgggcgacgccactgatactgatggtcatcatcgcggcgctggttcccaacacgagcttcctgggccacgcggccgggctcgccatcggctacgtatgcggcctgggctacctcaagttcctgtcgccgcccgagaaggcgctgcgctggatcgaggcccgcctcaagctgctccagaggctgccgcgctacgtgagcgtcgaccagaagacgtacgggcgcttcggtgttctcccctcggccgccggtggcgttggaccgtcgcagggtatgccgttgggtgttgttggtactggtggtgctggacagaggctgggcccttaggcgacacaacgtggactcgcttggatttcttctgtttaccaaaagacttgttctcatcatgcacgatatgcggttgttacatggtaatctggatagcgggggagggggggggcgcttgctggcgttgctggtcgggaaggtgttgcgatctggtcagggtcttttaactcggtcgctctcagagccatttaatcacctcgcaggctagaatcaggactgggctttgcagtcggccagcaagcatggctttcaacaaattctaagagcatcaagtagatcaagaccagacactttgacactttgacatgggtctcttgggcgaggcccaaagcgtgtgccacacagtattcaaatagcggggactattatgcaattgaaggctacaagccagctaagcttctcggaggctccgtcatggacatcaacagcaggatacgacaacaacctgtcacgtcgcaaggctggttgtggggaatacggctgtgtgtgcttcgactccatgggtccttgagcctgcaagtgtgctccgccgggtaactcattggcctgcaggcgcctgaagggacacgtgctgccggcacctctctcctttcctcgaaccccaagctcccctgagcgcccacgcccacgagagcaacacgatgtcgcagctcctatgtgagattgcaaaccgctcccgcccaccgggtccccattgccatcccccatggctgacccctgctcaagccggcgccctgcgcctccgccgcgacccccgcctcctgaagctgccgccctacatctccctgctgtgcatcgtcgtcggcgtcgtgtggctgctcatgctaccgcagaacgactactcccggcggacctacatttccgagaacgcgctcctgccgggccaggtgcacacgtatttcggcggcagcgaccagaacgtcttccgggcgtacaagcacgaggtcgacgcgcttgttgggcggaccaacaccgaggtcaacgacgggctcgagggcatcttcaaggctgttgggctcaaggccggccggcagaacttcacctactctagctcgggcaacacgtacgccggcgagaacgtctatgccatcctgcaggccccgcgaggcgacgcgaccgaggccatcgtgctggtcgccgcctggcagaacgtccgcggcgagctcaaccggcgcggggtggcgctgctgctgacgctggcgcgctacttccggcggtggtccctgtggtccaaggacatcatcctcgtggtgccgcccgacagcctcgcgggcccgcaggcgtgggtggacgcgtaccacgacgcccacgacacgcggcgcatcgacccgctgcccatgaagtccggggcgctgcagggcgccatcgcgctcgactacgcgcaggagcaccgcttccactcgctgcacgtcgtgtacgacggcatcaacgggcagctgcccaacctggacctcatcaacagcgtcgtcaacatcgccggcggccagatgggcatcggcgtgtccatccaggagatgtggtcccacggcgactcgtacgacgacaggctgcgcaccatgctgcgcggcatgatgaagcaggggctgggcatggcgtccggcccgcacagctgcttcatcccctaccacgtcgacgccgtcaccctccgcccctacggcgagggctggcaggacgagatggccatgggccgtgtcgtcgagggcacattccgctccctcaacaacctgctcgagcacctgcaccagagcttcttcttctacctgctcatgcacaaggaccgcttcgtcagcatcggcacctacctgccgagcgccatgttggtcgcggcaaactttaccatcatatcgatcgcgctgtgggtgaggagcggccaggctggggaggtcgaaaagccggcagagaccaccggcaaggagaaggcggcgacgggcgacaagggcccggccgacgccattctgacaccggcctccgagagggacttcttgctccctctggtgcttgtcgccggctgtcagttcctgggtgtcgtcccgttctacattttcaataacctgcccgagggcgtaagtttcgccccatcctggacacatccggacgtaaaaaaaaaaaatttttttwmaattttttaaaaaaaataaaaataaaaaaaatttcaaaaaaaaaatgaaaaaaaaaaactaacagcccgcagatgcacaccccagtcttcatcatcttcacggccctcaacgccgccctcccacacgtcgcctcccacctgctgacaaccaggttccgcccgactgcgcagcagtacgccctgatgcagtccttctccctcctcctgctgggaatgttcctctccacgctggcgacgctcaacttctccctctcgctcatggtggggctgctctcgacgccgctctcgttcgtgcggccatggccctccctgcccgcggcgcggtgggcctcggcgctgctcctccacctgctggcgccgaccgcggtgctggccctgtggagcgcgtactggtcggcgtggtccggcctgggcgaggtgctgcgcgaggcggccttcgggtggcatgtctggagcatgtatacaagcgtcgtcgcctggggcgtctggtggcccgcctggcttgtcggtgctattgccgtgctggggaggccaggcgcgagcggagcagagggcaagaaagctgggaa

SEQ ID NO: 124 - protein, 868 aa, Diplodia maydis
MSTPTLQSFSAGRAKSYVYKLPLFTRLVVSIIVATWAAGVVSGSRWDMQAWGALVPDEVGITSLYRTNTYPLIHLNFLHMIMNVLALTPLLERFESEYGTLTSLALFFGPFSTFPAFLYILMEKVILHSNNGVMGASVWFFLLLGAEAMRTYRTNPHFTIATYNIPTWATPLILMVIIAALVPNTSFLGHAAGLAIGYVCGLGYLKFLSPPEKALRWIEARLKLLQRLPRYVSVDQKTYGRFGVLPSAAGGVGPSQAGALRLRRDPRLLKLPPYISLLCIVVGVVWLLMLPQNDYSRRTYISENALLPGQVHTYFGGSDQNVFRAYKHEVDALVGRTNTEVNDGLEGIFKAVGLKAGRQNFTYSSSGNTYAGENVYAILQAPRGDATEAIVLVAAWQNVRGELNRRGVALLLTLARYFRRWSLWSKDIILVVPPDSLAGPQAWVDAYHDAHDTRRIDPLPMKSGALQGAIALDYAQEHRFHSLHVVYDGINGQLPNLDLINSVVNIAGGQMGIGVSIQEMWSHGDSYDDRLRTMLRGMMKQGLGMASGPHSCFIPYHVDAVTLRPYGEGWQDEMAMGRVVEGTFRSLNNLLEHLHQSFFFYLLMHKDRFVSIGTYLPSAMLVAANFTIISIALWVRSGQAGEVEKPAETTGKEKAATGDKGPADAILTPASERDFLLPLVLVAGCQFLGVVPFYIFNNLPEGMHTPVFIIFTALNAALPHVASHLLTTRFRPTAQQYALMQSFSLLLLGMFLSTLATLNFSLSLMVGLLSTPLSFVRPWPSLPAARWASALLLHLLAPTAVLALWSAYWSAWSGLGEVLREAAFGWHVWSMYTSVVAWGVWWPAWLVGAIAVLGRPGASGAEGKKAGK

SEQ ID NO: 125 - DNA, 1911 bp, Diplodia seriata
atggctctgctcacccccgccatcctcggcctccgccgcgatgcccgcatcctgaagatcccgccctacctgtccgctctgtgcatcgttgtcggcgtcatctggctgttcttgctgccattgaacgactactcgcgccagacatacatttccgagaacgcgctgctgcccgcccaggtccacacctacttcggcggcagcgagcacaacgtcttccgtgccttcaggcacgaggtccatgccctgctcgacaaggatgtccacggccggagccagacgctggaggacatcctgaagtcggccggtctgaagacggcccgccagaagtacacctacaagcttccgggcaacgacgtcgtcggcgaaaacgtctacggcgtgatccaagggccgcgcgccgatgctaccgaagccgtcgtgctggttgcatcctgggagacggttgatggcgaggtcaaccagagcggcgttgctctggccctcacgctcgcccgctatttcaagaggtggtcgctctggtccaaggacatcatcgtcctcatcaccagcgacaccaccgccggctctcaggcctgggttgatgcctaccacaacgcccacgaccccaccagagtcgaggcccttcctctcaagagcggggcgcttcagggagccgtggctatcgagtacccagccggcccctggggccaccgcttcgacaagcttcacgtgctctacgacggcatcaatggccagctccccaacctggacctttttaacactgccgtcgccattgccagcggccaaatgggcattgggtgcacgctccagcgcatgtgggaccataaggatacctatgacgaacggctcctgacaatgctccgcggcatgatcagccagggtctcggccatgcttccggtccccacagcgccttcattccctaccacgtcgatgccatcacgctccagactgtgggcagtgggtggcacgacgagatgtctctgggcaggacggtggaaagtgtgttccgcagcctgaacaatctcctcgagcacctgcaccagagcttcttcttctacctcctgatgcaggccaatcgcttcgtcagcattggaacttatcttcccagcgccatgctgattgccgtaaactttaccataacggccatcgcactttgggttcagagcggacgtcctcctgtccccgacgagaagcccgcttcaacacaaaccaaagacgagaaaaagccggatatgaccgtcgtcaaggaagggagcgacatcgccatcgtcccatccgtcatcttcacgaccgtagagcgcaacctgctcctgcctcttgctttcgtcagcggtgtccacgccctcggcctcattcccctcaacatcttcaaccacacatccggcgaccacctcggcaaagccttcatcctcgtcaccgccatcacccttgccgcaccgccgctgatatcattcctcctcatccgacaactacaccgcaccctcacggcccaggaaacctgcctcctgcaatgcttctcgctcctcctcctcggcatgtttttctctgcccttgccaccctcaacttctccctctccttcctcgtcggtctctgcgccgcgcccctcaccttcgtccgaccaccctcccatacggcctctcgcaaccgcaaactcctgctcgcgggcgctcagtacacgctcctcatcctgctcagcccggtcacggtcgtcggcatcgcgagccaggagctggaagggaaagggctgctgaacgttggcgagtgggtcggattggcggccatcaggcaggtgctggtacaggcggcgttcgggtggcatgtgtggggcttgtggacgcaggtggtcgtgtggttggtgtggtggccggcatggttcgtaggcgccgtcgtgaattactcgcgcatgtaa

SEQ ID NO: 126 - protein, 636 aa, Diplodia seriata
MALLTPAILGLRRDARILKIPPYLSALCIVVGVIWLFLLPLNDYSRQTYISENALLPAQVHTYFGGSEHNVFRAFRHEVHALLDKDVHGRSQTLEDILKSAGLKTARQKYTYKLPGNDVVGENVYGVIQGPRADATEAVVLVASWETVDGEVNQSGVALALTLARYFKRWSLWSKDIIVLITSDTTAGSQAWVDAYHNAHDPTRVEALPLKSGALQGAVAIEYPAGPWGHRFDKLHVLYDGINGQLPNLDLFNTAVAIASGQMGIGCTLQRMWDHKDTYDERLLTMLRGMISQGLGHASGPHSAFIPYHVDAITLQTVGSGWHDEMSLGRTVESVFRSLNNLLEHLHQSFFFYLLMQANRFVSIGTYLPSAMLIAVNFTITAIALWVQSGRPPVPDEKPASTQTKDEKKPDMTVVKEGSDIAIVPSVIFTTVERNLLLPLAFVSGVHALGLIPLNIFNHTSGDHLGKAFILVTAITLAAPPLISFLLIRQLHRTLTAQETCLLQCFSLLLLGMFFSALATLNFSLSFLVGLCAAPLTFVRPPSHTASRNRKLLLAGAQYTLLILLSPVTVVGIASQELEGKGLLNVGEWVGLAAIRQVLVQAAFGWHVWGLWTQVVVWLVWWPAWFVGAVVNYSRM

SEQ ID NO: 127 - DNA, 1782 bp, Fusarium fujikuroi
  misc_feature: Fusarium fujikuroi IMI 58289
atgtcgcgactactttcttcagcgctgtcgctacgtcgcgatcctcgtattctaaaactccccccttacttgtccttcatctgcatcgcgatcggtgtaatctggctctttcttctgccattaaacgaatactcgcgtcggacgtacatctcagagaatgccctgttgccaggtcaagtgcatacatattttggaggaagcgaacaaaacatcttccgcgcctaccgacatgaggttgacgatgtagtcgacaagaacaactatgagatcaacgacaggctcggcaagattctcacgggtgttggattaaaggttgggcgtcaaaattacacctaccactcagctggccatgagtactcaggacagaacctctacgcaatcctgcaagctccccgtggtgatgccaccgaggcaattgtattggtagctgcatggaagaacgttgaggagcagctcaaccgcaacggcgtatctctggcattgactttggtccgttactttaaacgctggtcactctggtctaaggacatcattcttgtagttcctcccgatagcaagacaggcacgcaggcttgggttgacgcataccatgatgctcataaccctgatcttgtggctcctttacctctcaagtccggtgctcttcagggtgcccttgctatcgactacccccaagaacagagcttcaagtctgttcatgtgatttatgatggccctaatggccagcttcctaatcttgatcttatcaactcaatcgtcaacattgctggtggccagatgggtatcggtacttctattcagaagatgacagagcacaagggtacctaccctgatcgtttacaaactatgttgcgtggcatgctcaaccaaggtctcgggtatgcagctggtgctcacagcagcttcatcccatatcacgttgatgccgtgacacttcagccctacggcgaaggatggcatgatgagatggccatgggacgcctggttgaggggtcattccgaagtctgaataatttgcttgagcatctgcaccagagtttcttcttttatcttctgatgcagaccgatcgcttcgttagtatcggtacttatcttcccagtgctatgttgattgctgccaactttaccatcatggctatctctctctgggtcaagagcggtcaatcaccagcgacgcagaaacccaaggagaagacatctaccgcatctcttgaaacaacacaagctggacgggatctgtttgttccgctcggtgttgttgctgtctgccagggtctcgcagctgtacctctgtacatattcaaccaccttcccgctggcttactctcgcccgcctttgctgcattctccgccatctcggccattctacccttcgcgatctctcgtctcctaacacttggcaccaagcccacgatgcagcacttccaactcacaaagtctttctctcttctcgttcttggcatgtgtctttctactcttgcaactctcaacttctctcttgcttttctcatcggcgtactctcaagcccactcagctttgtccagccggtcaaaagcctggggcttcgctggtctctagcaggtctcctcaatgtcgtgtcaccacctacagttttgtacgctgcggcccaaatctgggacattagtattgcggacttgctgaaggaggctagcttcggctggaacgtctggggcatgtacacacccgttgtagtatggtgcctttggtggccagcctggcttgtaggcatggtcaatgtcttcggagaggttactgcttga

SEQ ID NO: 128 - protein, 593 aa, Fusarium fujikuroi
MSRLLSSALSLRRDPRILKLPPYLSFICIAIGVIWLFLLPLNEYSRRTYISENALLPGQVHTYFGGSEQNIFRAYRHEVDDVVDKNNYEINDRLGKILTGVGLKVGRQNYTYHSAGHEYSGQNLYAILQAPRGDATEAIVLVAAWKNVEEQLNRNGVSLALTLVRYFKRWSLWSKDIILVVPPDSKTGTQAWVDAYHDAHNPDLVAPLPLKSGALQGALAIDYPQEQSFKSVHVIYDGPNGQLPNLDLINSIVNIAGGQMGIGTSIQKMTEHKGTYPDRLQTMLRGMLNQGLGYAAGAHSSFIPYHVDAVTLQPYGEGWHDEMAMGRLVEGSFRSLNNLLEHLHQSFFFYLLMQTDRFVSIGTYLPSAMLIAANFTIMAISLWVKSGQSPATQKPKEKTSTASLETTQAGRDLFVPLGVVAVCQGLAAVPLYIFNHLPAGLLSPAFAAFSAISAILPFAISRLLTLGTKPTMQHFQLTKSFSLLVLGMCLSTLATLNFSLAFLIGVLSSPLSFVQPVKSLGLRWSLAGLLNVVSPPTVLYAAAQIWDISIADLLKEASFGWNVWGMYTPVVVWCLWWPAWLVGMVNVFGEVTA

SEQ ID NO: 129 - DNA, 1782 bp, Fusarium graminearum
  misc_feature: Fusarium graminearum PH-1
atgtcgcgacttctttcatcggcgctctcgctacgtcgcgaccctcgtatcctgaagctacccccttacttgtccttcctctgcatcgcggttggtgtgatctggctgtttcttctgcccctgaacgaatactcgcggcgaacatatatctctgagaacgctctgctacctggacaagtccatacgtattttggaggaagcgagcaaaatatcttccgcgcataccgccacgaggttgatgatgttgtcaacaagagcaattacgaagtcaacgataggctggacaagatcctgaccggtgtcggactcaaggttggacgtcagaactacacctacaactcggctggccatgagtactcaggacagaacctctatgccattttgcaagccccccgcggtgatgctacagaagctattgtcttggttgcggcatggaagaatgttgaggaacagctcaaccgtaacggcgtgtctctcgctttaactcttgcccgttactttaaacgctggtccctgtggtccaaagatatcattctcgtattcccacctgatagcaagacagggacacaggcttgggtagacgcataccatgatgcccacaatcctgacctcgtggcccccctacctctcaagtccggcgctctccagggtgctcttgctatcgattacccccaagagcaaagcttcaagtctgtgtacataatttacgacggacctaatgggcagcttcccaacctcgatctcattaactctatagtcaatattgctggtggccagatgggtatcagcacttctatccagaagatgacagagcacacgggcacttaccccgatcgcttgcagactatgcttcgtggtatgcttaaccaaggcctcggctactcagctggtgctcatagtaactttatcccttatcacgtcgatgccgttactcttcagccctacggtgaaggatggcatgatgaaatggctatgggccgcgtgattgagggctcattccggagtttgaacaacctgcttgagcatctgcaccaaagttttttcttctatttgttgatgcagactgaccggtttgtcagtattggaacttaccttccgagtgctatgctgattgctgccaactttaccatcatggccatctctctttgggtaaagagcggccagacgccagcaacagagaagtccaaagaaaaggactcggccacctctgtcgatgcgatacaggctggaagagatttgtttgtcccactaggtgtcgttgctgtctgccaaggcctcgcagccgtgcctctatacaccttcaaccatcttcctgccagtttgctctctcctgcatttgccggcttctccgtcgtgtctgccatccttcccttcgctatctctcgcctcttaacgctgttcaccaagcccaccattcagcacttccagctcacaaagtctttctctttgctcgttctaggaatgtgcctctcgactctggctacgctcaacttctctctcgctttcctcgttggtgtgctatctagcccattaagctttgtccagcctgtcaagaacccagccctgcgctggtctttggcaggattgctcaacattgtggccccgcccacggtagtgtatgctgcagcccaactctggcatatcagcatagcagacctgttaaaggaggcaagcttcgggtggaatgtttggggtatgtatacgccagttgtggtttggtgtctatggtggcctgcttggctcgtgggcatggtcaacgtttttggagaggtcgctgcttga

SEQ ID NO: 130 - protein, 593 aa, Fusarium graminearum
MSRLLSSALSLRRDPRILKLPPYLSFLCIAVGVIWLFLLPLNEYSRRTYISENALLPGQVHTYFGGSEQNIFRAYRHEVDDVVNKSNYEVNDRLDKILTGVGLKVGRQNYTYNSAGHEYSGQNLYAILQAPRGDATEAIVLVAAWKNVEEQLNRNGVSLALTLARYFKRWSLWSKDIILVFPPDSKTGTQAWVDAYHDAHNPDLVAPLPLKSGALQGALAIDYPQEQSFKSVYIIYDGPNGQLPNLDLINSIVNIAGGQMGISTSIQKMTEHTGTYPDRLQTMLRGMLNQGLGYSAGAHSNFIPYHVDAVTLQPYGEGWHDEMAMGRVIEGSFRSLNNLLEHLHQSFFFYLLMQTDRFVSIGTYLPSAMLIAANFTIMAISLWVKSGQTPATEKSKEKDSATSVDAIQAGRDLFVPLGVVAVCQGLAAVPLYTFNHLPASLLSPAFAGFSVVSAILPFAISRLLTLFTKPTIQHFQLTKSFSLLVLGMCLSTLATLNFSLAFLVGVLSSPLSFVQPVKNPALRWSLAGLLNIVAPPTVVYAAAQLWHISIADLLKEASFGWNVWGMYTPVVVWCLWWPAWLVGMVNVFGEVAA

SEQ ID NO: 131 - DNA, 1782 bp, Fusarium oxysporum
  misc_feature: Fusarium oxysporum f. sp. cubense race 4
atgtcgcgactactctcatcagcgctttcgctgcgtcgcgatcctcgtattctaaagcttcccccttatttgtccttcatctgcatcgcgatcggtgtaatctggctctttcttctcccattaaacgaatactcgcgtcgaacgtacatctccgagaatgccctgttgccaggtcaagtgcatacatattttggaggaagcgaacaaaacatcttccgcgcctaccgacatgaggttgacgatgtagtcgacaagaacaactatgagatcaacgacaggctcgataagattctcacaggtgttggattaaaggttggacgtcaaaattacacctaccactcagctggccatgagtactcaggacagaacctctacgcaatcctgcaagctcctcgtggcgatgccactgaggcaattgtgttggttgctgcatggaagaatgttgaggagcagctcaaccgcaacggtgtatctctggcattgactttggtccgttactttaaacgctggtcactctggtctaaggacatcattcttgttgttcctcctgatagcaagacaggcacgcaagcttgggttgacgcataccatgatgctcataaccctgatcttgtggctcctttgcctctcaagtccggtgctcttcagggtgcccttgctattgactacccccaagaacagagtttcaagtctgttcatgtgatttacgatggccctaacggccagctccctaatcttgatcttatcaactcaatcgtcaacattgctggtggtcagatgggcattgggacctctattcaaaaaatgacggagcacaagggcacctaccctgatcgtttacaaactatgctgcgcggtatgcttaaccaaggcctcggctacgcagctggtgctcacagcagcttcatcccatatcacgttgatgccgtgacacttcagccttacggcgaaggatggcatgatgagatggccatgggacgcctggttgaggggtcgttccgaagtctgaacaatttgcttgagcacctgcatcagagtttcttcttctatcttctgatgcagactgaccgcttcgtcagtatcggcacttatcttcccagtgctatgttgattgctgccaactttaccatcatggctatctctctctgggtcaagagcggtcagtcaccagccatgcagaaacccaaggagaaggcttctaccacatctgtcgaagcaacacaagctggacgggacctgtttgttccgcttggtgtcgttgctgtctgtcagggtctcgcagctgtgcctttgtacatcttcaaccaccttcccgctggcttactctcgcccacttttgctgcattctctgtcatctcggctatcttgcccttcgcgatctcgcgtctcctaacccttgtcaccaagcccacgatgcagcacttccaactcacaaagtccttctctcttctcgttcttggcatgtgtctttctactcttgcaactctcaatttttctctcgcttttctcatcggcgtactctcaagcccgctcagctttgtccagccggtcaagaaccggggccttcgctggtctctagcaggtctccttaatgtcgtgtcaccacctacagttttgtacgcagcggcccaaatctgggacatcagtatcgcggatctgttgaaggaggccagcttcggctggaacgtctggggcatgtatacacccgttgtggtatggtgcctttggtggccagcctggctcgtgggcatggtcaatgtcttcggagaggttactgcttga

SEQ ID NO: 132 - protein, 593 aa, Fusarium oxysporum
MSRLLSSALSLRRDPRILKLPPYLSFICIAIGVIWLFLLPLNEYSRRTYISENALLPGQVHTYFGGSEQNIFRAYRHEVDDVVDKNNYEINDRLDKILTGVGLKVGRQNYTYHSAGHEYSGQNLYAILQAPRGDATEAIVLVAAWKNVEEQLNRNGVSLALTLVRYFKRWSLWSKDIILVVPPDSKTGTQAWVDAYHDAHNPDLVAPLPLKSGALQGALAIDYPQEQSFKSVHVIYDGPNGQLPNLDLINSIVNIAGGQMGIGTSIQKMTEHKGTYPDRLQTMLRGMLNQGLGYAAGAHSSFIPYHVDAVTLQPYGEGWHDEMAMGRLVEGSFRSLNNLLEHLHQSFFFYLLMQTDRFVSIGTYLPSAMLIAANFTIMAISLWVKSGQSPAMQKPKEKASTTSVEATQAGRDLFVPLGVVAVCQGLAAVPLYIFNHLPAGLLSPTFAAFSVISAILPFAISRLLTLVTKPTMQHFQLTKSFSLLVLGMCLSTLATLNFSLAFLIGVLSSPLSFVQPVKNRGLRWSLAGLLNVVSPPTVLYAAAQIWDISIADLLKEASFGWNVWGMYTPVVVWCLWWPAWLVGMVNVFGEVTA

SEQ ID NO: 133 - DNA, 1782 bp, Fusarium pseudograminearum
  misc_feature: Fusarium pseudograminearum (strain CS3096)
atgtcgcgacttctttcatcggcgctctcgctacgtcgcgaccctcgtatcctgaagctacccccttacttgtccttcctctgcatcgcggtcggtgtgatctggctgtttcttctacccctaaacgaatactcgcggcgaacatatatctcggagaacgctctgctacctggacaagtccatacgtattttggaggaagcgagcaaaatatcttccgcgcataccgccacgaggttgatgatgttgtcaacaagagtaattacgaagtcaacgataggctggaaaagattctgaccggtgttggactcaaggttggacgtcagaactacacctacaactcggctggccatgagtactcaggacagaacctctatgctattttgcaagccccccgcggtgatgctacagaagctattgtcttggttgcggcatggaagaatgttgaggagcagctaaaccgtaacggcgtgtctctcgctttaactcttgcccgttacttcaaacgctggtccctgtggtccaaagatatcattctcgtattcccacccgatagcaagacagggacacaggcttgggtagacgcataccatgatgcccacaatcctgacctcgttgcccccctacctctcaagtccggcgcgctccagggtgctcttgctatcgactatccccaagagcaaagcttcaagtctgtgcacataatctacgacggacccaatggacagcttcccaacctcgatctcattaactctatagtcaatattgctggtggccagatgggcatcagcacttctatccagaagatgacagagcacacgggcacttaccccgatcgcttgcagactatgcttcgtggtatgcttaaccaaggcctcggctactcagctagtgctcatagtagctttattccttatcacgttgatgccgttactcttcagccctacggtgaaggatggcatgatgaaatggccatgggccgcgtgattgagggctcattccggagtttgaacaacctgcttgagcatctgcaccaaagttttttcttctatttgttgatgcagactgaccggtttgtcagtattggaacttaccttccgagtgctatgctgattgctgccaactttaccatcatggccatctctctttgggtaaagagcggccagacgccagcgacagagaagtccaaggaaaaggactcggccacctctgtcgatgcgatacaagctggaagagatttgtttgtcccactaggtgtcgttgctgtctgccaaggcctcgcagccgtgcctctatacaccttcaaccatcttcctgccagtttgctctctcccgcatttgccggcttctccgtcttgtctgccatccttcccttcgccatctctcgcctcttaacgctgttcaccaagcccaccattcagcacttccagctcacaaagtctttctctttgctcgttctaggaatgtgcctctcgactctggctacgctcaatttctctctcgctttcctcgttggtgtgctatctagcccgttgagctttgtccagcctgtcaagaacccagccctgcgctggtctttggcaggattgcttaacattgtggccccgcccacggtagtgtatgctgcagcccaactctggcatatcagcatagcagacctgttaaaggaggcaagcttcgggtggaatgtttggggtatgtataccccagttgtggtttggtgtctttggtggcccgcttggctcgtgggcatggtcaacgtttttggagaggtcgctgcttga

SEQ ID NO: 134 - protein, 593 aa, Fusarium pseudograminearum
MSRLLSSALSLRRDPRILKLPPYLSFLCIAVGVIWLFLLPLNEYSRRTYISENALLPGQVHTYFGGSEQNIFRAYRHEVDDVVNKSNYEVNDRLEKILTGVGLKVGRQNYTYNSAGHEYSGQNLYAILQAPRGDATEAIVLVAAWKNVEEQLNRNGVSLALTLARYFKRWSLWSKDIILVFPPDSKTGTQAWVDAYHDAHNPDLVAPLPLKSGALQGALAIDYPQEQSFKSVHIIYDGPNGQLPNLDLINSIVNIAGGQMGISTSIQKMTEHTGTYPDRLQTMLRGMLNQGLGYSASAHSSFIPYHVDAVTLQPYGEGWHDEMAMGRVIEGSFRSLNNLLEHLHQSFFFYLLMQTDRFVSIGTYLPSAMLIAANFTIMAISLWVKSGQTPATEKSKEKDSATSVDAIQAGRDLFVPLGVVAVCQGLAAVPLYTFNHLPASLLSPAFAGFSVLSAILPFAISRLLTLFTKPTIQHFQLTKSFSLLVLGMCLSTLATLNFSLAFLVGVLSSPLSFVQPVKNPALRWSLAGLLNIVAPPTVVYAAAQLWHISIADLLKEASFGWNVWGMYTPVVVWCLWWPAWLVGMVNVFGEVAA

SEQ ID NO: 135 - DNA, 1827 bp, Gaeumannomyces graminis
  misc_feature: Gaeumannomyces graminis var. tritici R3-111a-1
atgccgcgcttattgtcttcgctcctcagcctgcggcggaacccgcgtgtcctcaagctcccgccctacctgtcgctgctgtgcatcgtcgtcggcatcgcttcgctcctcgtcctgccgctcgacagccagtcccgacgcacctatatatctgagaacgcgctgctgccagggcaggtacacacgtactttgccggcagcgaccagaacgtctttcgcgcctacaagcacgaggtggaccggctgctggacaagagcaatgttgaaataaacgacaagctcgagagcatcctcggcgacgtggggctcaagacggcgcggcagaacttcacctacacgtcgtctggcatcgtacactcgggcgagaacctctacgcgctgctgcgcgccccgcgcggcgacgccaccgaggccatcgtgctggtggcggcgtggcgcaaccccgcgggcgagccgaaccgcaacggcgtggcgctcgcgctgacgctggcgcgctacttccggcgctggtcgctgtggtccaaggacatcgtattcctcctcccgcccgactcgctggcgggcccgcaggcgtgggtggacgcgtaccacgacgcgcacgacgcctcggccgtggcctcgctcccgctcaagagcggcgcgctgcagggggcgctggcgctcgactacgcgcgcgaaggccgctacgagagcgtgcacgtcgtctacgacggcgtcaacgggcagctgcccaacctggacctgatcaacagcgtcgtcaacatcgcgggcggccagatgggcatgggcgtgtcgctgcaggagatgtggtggggcggcggcgacggctacgccgaccggctgcgcaccatgctacgcggcatgctgcgccagggcctgggcgcctcgacgggcgcccactcgtgcttcatgccctaccatgtcgacgccgtcacgctcgcgccccacggcgacggctggcaggacgagatggcgctcggccgcgtcgtcgagggcaccttccggtcgctcaacaacctgctcgagcacctgcaccagagcttcttcttttacctgctcatgcaccgcgagcgctttgtgagcatcggcacgtatctgcccagcgtcatgctgatggccgcaaactttaccatcatggctctgtacctgttctccaaggccggccagaccgggggcggggtcgagggtgagggtgagggcgagggcgagaagaccaaggacaagacggtgtcctctcccgacgcaaagccggtcgagcgtgacctcctggcgcccttatgcttcgtggcattctgccacttcctgggcttcatccctctgtatctctttaaccatgtccccgccgggctcctcgtccccttggccgccttcttcgccgccttcaacacggccttcccgctcctggcctcgcacctcctgacgtacaggtaccgcctcacgctgcagcagtaccacctgatccacgccttctccctcctgctgctcggcatgttcgtcgcctgcctcgccaccctcaacttctcgctcgccttctggctcgccctcctctgcgcgcccttgtccttcttccgcccctggcccgcgacctcgccgcgcggctacggggttcgtctgcacctgcagctgctcatctcggtccccgccgtcgttgttgcgtgctgcgtcgcctgggacctggacctcggccgcgtcctgcgcgacgccgcctttgcctggaacgtctggggcacatatacgccgctcgtcgtgtggtgcgtctggtggcccgcctggctggcctcgtgtgtggtgctgaggggaggacctgggcttaaggagaataaatag

SEQ ID NO: 136 - protein, 608 aa, Gaeumannomyces graminis
MPRLLSSLLSLRRNPRVLKLPPYLSLLCIVVGIASLLVLPLDSQSRRTYISENALLPGQVHTYFAGSDQNVFRAYKHEVDRLLDKSNVEINDKLESILGDVGLKTARQNFTYTSSGIVHSGENLYALLRAPRGDATEAIVLVAAWRNPAGEPNRNGVALALTLARYFRRWSLWSKDIVFLLPPDSLAGPQAWVDAYHDAHDASAVASLPLKSGALQGALALDYAREGRYESVHVVYDGVNGQLPNLDLINSVVNIAGGQMGMGVSLQEMWWGGGDGYADRLRTMLRGMLRQGLGASTGAHSCFMPYHVDAVTLAPHGDGWQDEMALGRVVEGTFRSLNNLLEHLHQSFFFYLLMHRERFVSIGTYLPSVMLMAANFTIMALYLFSKAGQTGGGVEGEGEGEGEKTKDKTVSSPDAKPVERDLLAPLCFVAFCHFLGFIPLYLFNHVPAGLLVPLAAFFAAFNTAFPLLASHLLTYRYRLTLQQYHLIHAFSLLLLGMFVACLATLNFSLAFWLALLCAPLSFFRPWPATSPRGYGVRLHLQLLISVPAVVVACCVAWDLDLGRVLRDAAFAWNVWGTYTPLVVWCVWWPAWLASCVVLRGGPGLKENK

SEQ ID NO: 137 - DNA, 2315 bp, Leptosphaeria maculans
  misc_feature: Leptosphaeria maculans JN3
atgcgcgtgggactgaactgcgggaacgacggcattgctgagcgcgactggtgtgagacgagatgcaggcgcgttgacgtgtgaaagacagcttagcggtagaaagcagcctagcacgcctcgtcactagggttcaggaaccgcgttgcgctaagcgtcgatcctcccgccttaacaccttcccagacggagttgcgccagatgctgggcagaagagaagaggactcgactctcccttctcctttccttccaaaggtacaattgactctgtggtggtgatggcgttgctctgtaggttgtgctctacatgcgctttgaggagtgacggctaacgtctgcagcatcgatattggcgctccgccgagatgcccgcattctcaagatcccaccttacctttcggcgctgtgtctcattgttggcatagcatggctgctcgtccttcctctgaatgaatattcgcgcgggacctacatttccgaaaatgctctcttaccaggtcaagtacacacatacttcggtggcagcgagcacaatgtctttcgtgcctatcgccatgaagtctttgggctgattgataagcctgtggaagagtaagtcccatgaaagggccttgcaaaagaagaaagcttacaagttcaggcgctctcacaagcttgagaccattttcaaggaacagaacctcaaggttgctactcaaaagtacaactttaccgtttccaaccgcacaatcgcgaatgagaatgtgtacgccatcctccagggccctcgcgctgacgctaccgaggcaattgtcctcgtcggagcatggaggaacatggacaatgagatcaacaactctggggtagctctggttctcacactggctcgatacttcaaacgatggagtctgtggagcaaggacatcatttttctagtctctggagacagtaccataggtcctcaagcttgggtggacgcctaccatgatgcacacgatgagcgctacgtcgagggactcaagatcaagagtggagcccttcaagcagctgtcgcggtcgactaccccgcagggccttggggtcatcgatatgaaaagctccacattgtgtacgatggggtcaatggccagctccccaatctggatcttttcaatacagcggtgcagatcgcatccgggcagatgggcattgcttgtggcatacagaacatgtggagacacaacgacgcatacaaggtgcgactggagaccatgtttcgaggcatgctatcgcagggtatgggttacgcaaccgggccgcattcatcattcatcccataccacgtcgacgccattactctacaaacggtcggtgatggctggcacgacgagatatcacttgggaagacggtcgagtctctgtttcgcagcttgaacaacctgctggagcatttccaccaaagcttcttcttctacctcttgctccattcgaaccgcttcgtcagcatcgggacctaccttccctcggctatgcttatcgctgtcaacttcagcatcgcggctatcgcactttgggtacagagcggaagatccacagagcctatcgccaaccctgcatccaccgcaccaaaagacaagatctccgacaagccagcctcaacctctagcgagaacccatcaacatctgccgctgcagatcctggaaccgttaaagaacctcccaaccccccttccccagctgtcgaggtcattaaaaaagacggcgccgtctccattgtccccaaatccctaaccacagtttcagaacgccacctcctcctccccctcgccttcgtcctcgtcctccacttcgccggcctcatccccctctacgtcttcaaccactgggacgaagaccacctgcaaggcctcttcctaaccgccgctaacatcaccgtcgtcatccccataggcatcgcattcgtcttcttcaacaaccggcccctctccactcaggaaacaaccctgatccaatgtttctccctcctcctcctcggcgtcttcctcgccgtcctcgccaccctcaacttctccctcagtttcttggtcggcgtcagttgtatcccgtttagcttcatcaggcggacgggcagtctgggcttgaatgtagccttgttgggcctcatggcgctgctgaatcctttgctggtcatgcatgcggctacctatttgctgggcggcaatatggctttgattctggaaaaggcggcgcagggatggcatatttggggtctgtggacccaggttgtggtgtttttggtctggttgccggcttgggcgattaatactagtgtgattgcgacgggagcttttgagtaa

SEQ ID NO: 138 - protein, 693 aa, Leptosphaeria maculans
MRVGLNCGNDGIAERDWYGVAPDAGQKRRGLDSPFSFPSKGTIDSVVVMALLSSILALRRDARILKIPPYLSALCLIVGIAWLLVLPLNEYSRGTYISENALLPGQVHTYFGGSEHNVFRAYRHEVFGLIDKPVEERSHKLETIFKEQNLKVATQKYNFTVSNRTIANENVYAILQGPRADATEAIVLVGAWRNMDNEINNSGVALVLTLARYFKRWSLWSKDIIFLVSGDSTIGPQAWVDAYHDAHDERYVEGLKIKSGALQAAVAVDYPAGPWGHRYEKLHIVYDGVNGQLPNLDLFNTAVQIASGQMGIACGIQNMWRHNDAYKVRLETMFRGMLSQGMGYATGPHSSFIPYHVDAITLQTVGDGWHDEISLGKTVESLFRSLNNLLEHFHQSFFFYLLLHSNRFVSIGTYLPSAMLIAVNFSIAAIALWVQSGRSTEPIANPASTAPKDKISDKPASTSSENPSTSAAADPGTVKEPPNPPSPAVEVIKKDGAVSIVPKSLTTVSERHLLLPLAFVLVLHFAGLIPLYVFNHWDEDHLQGLFLTAANITVVIPIGIAFVFFNNRPLSTQETTLIQCFSLLLLGVFLAVLATLNFSLSFLVGVSCIPFSFIRRTGSLGLNVALLGLMALLNPLLVMHAATYLLGGNMALILEKAAQGWHIWGLWTQVVVFLVWLPAWAINTSVIATGAFE

SEQ ID NO: 139 - DNA, 1920 bp, Macrophomina phaseolina
  misc_feature: Macrophomina phaseolina (strain MS6)
atggctctgctcgctcccgccattcttggcctccgccgcgatgcccgcgtccttaagatcccgccctacctgtccgctctgtgcatcatcgttggcgtcatctggctgttcctgttaccattgaacgactactcgcgccagacgtacatctccgagaacgccctgttgcccggccaggtccatacctacttcggcggcagcgagcacaacatcttccgcgcatacagacatgaggtccatgctttgatggacaaggatgtccacgagcggagccagaaactggaggagctcctgaaatcgaccggcctgaagacggcgcgccaaagatacgcctacaaaacccctgggaaggatatagtcggagagaacgtgtatgcagtgctccagggcccgcgtgcggatgcgactgaggccgtcgtgctggttgcctcttgggaaactgtcaagggcgaaattaaccagagcggcgttgctctggctctgacgctcgcacgttatttcaagagatggtcgctctggtctaaggacatcatagtgctcatcgccagcgataccaccgcaggatcccaagcctgggttgacgcttaccacaacacccatgaccccgccaaagttgagcccctcccccttaagagtggtgcccttcagggagctgtcgccattgagtatccggcaggtccttggggccatcgttttgacaagctgcacgtgctctatgacggcatcaacgggcagctgcccaacctggacctattcaacactgctgtggcaattgcgagtggacaaatgggcattgggtgcacaattcaacgcatgtggaaccaccaggacagctacgaggaacgactccagactatgctccgcggcatgataagtcagggtcttggacatgcgtcaggcccccacagcgcctttattccttaccacgttgacgcggtgacgttgcagacagtgggagatgggtggcatgatgagatgactctgggaaggacagttgagagtttgttccgcagcttgaacaacctcctcgagcatctacaccagagctttttcttttaccttctgatgcaagccaatcgtttcgtcagcataggaacctatctgcccagcgcgatgttgatcgctgtcaatttcaccataacagctataggcctttgggttcaaagcggacgtcctcccattcctgaagagaagcctgcatccaccgattctcaggatgaaaagaagcccgacatgaccgtgatcaaggaggacaacaaggtcgctgtcgtcccatctatcatcctgacaacagtcgagcgcagccttcttctgcctctcgcgtgcgtcagcggcgtccacttcctgggacttgttcctctgaccatcttcaaccacactcccggtgaacatcttggcacggccttcatcctcgtctccgtcctcagcctcgcagctccagcagctacctccttcctactgacccgcgtgcaccgggccctgaccccgcaagaaagctgcctcctccaatgcctatccctcctcctcctaggcatgttcttctccgcactcgccaccctcaacttctccctctccttcctcgtcggcctctgcgccgcgcccctcaccttcgtccgccccatccacccctctccctcctcacccagaaatcgccgcatcctgctcgccgccctgcagtacgctctgctcgtcctcctcagccccgtcacggttgtgggagtagccagccaggaattggttggtaaagggctggcgaggggcgactgggtgggtgtcgacgcggttagacaggtgctggtgcaggccgccatggggtggcacgtgtggggcttgtggacgcaggtcgtggtatggttggtgtggtggccggcatggtttgtgggcgcggttgtggttagcgggtccttttttactcgctag

SEQ ID NO: 140 - protein, 639 aa, Macrophomina phaseolina
MALLAPAILGLRRDARVLKIPPYLSALCIIVGVIWLFLLPLNDYSRQTYISENALLPGQVHTYFGGSEHNIFRAYRHEVHALMDKDVHERSQKLEELLKSTGLKTARQRYAYKTPGKDIVGENVYAVLQGPRADATEAVVLVASWETVKGEINQSGVALALTLARYFKRWSLWSKDIIVLIASDTTAGSQAWVDAYHNTHDPAKVEPLPLKSGALQGAVAIEYPAGPWGHRFDKLHVLYDGINGQLPNLDLFNTAVAIASGQMGIGCTIQRMWNHQDSYEERLQTMLRGMISQGLGHASGPHSAFIPYHVDAVTLQTVGDGWHDEMTLGRTVESLFRSLNNLLEHLHQSFFFYLLMQANRFVSIGTYLPSAMLIAVNFTITAIGLWVQSGRPPIPEEKPASTDSQDEKKPDMTVIKEDNKVAVVPSIILTTVERSLLLPLACVSGVHFLGLVPLTIFNHTPGEHLGTAFILVSVLSLAAPAATSFLLTRVHRALTPQESCLLQCLSLLLLGMFFSALATLNFSLSFLVGLCAAPLTFVRPIHPSPSSPRNRRILLAALQYALLVLLSPVTVVGVASQELVGKGLARGDWVGVDAVRQVLVQAAMGWHVWGLWTQVVVWLVWWPAWFVGAVVVSGSFFTR

SEQ ID NO: 141 - DNA, 1821 bp, Magnaporthe oryzae
  misc_feature: Magnaporthe oryzae 70-15]
atgccgcgcttattatccactgttttgagcctacggcgggatccccggatcctcaagcttccaccttacctctcagtgctatgcatagtcgtcggcatcgtgtcccttctgcttttacctctcgataactttacgaggaggacttatatatccgaaaatgcgctcctcccgggccaggtccatacgtactttgccggcagcgatcagaatgtctttcgggcttacaaacacgaggtcaacagtctggtagacaagagcaatgtcgagatcaacgacaaactcgagagcattttcaagggcgtagggctcaaagttggccgccagaacttcacatactcgtcttccggcatccaacacagcggcgagaacgtctacgcaattcttcaggcgccccgcggtgatgcgaccgaggccattgtgctcgtgacggcctggcgcaatcccaatggcgagctgaaccgcaacggggtggccctggccctaacgctggcgcgctactttcggcgctggtccctctggtccaaggacatcatctttttgctgccgccggactcactcgcaggaccccaggcctgggtcgatgcctaccacgacgcgcacgacccgcgcaaggtcgcggcgctcccgctcaagtcgggcgcgctgcagggcgcgctggcgctcgactacacgcgcgaggaccgctacgagagtgtgcaccttgtctacgacggcgtcaacggccagctgccgaatctggaccttttcaacagcctcgtgcacgtcgcgggtggccagatgggcataggcgtctcgatccaggacatgtggcaccaccgcaacgactaccgcgatcggctgcagaccatgctgcgcggcatgctgcgacagggcatcggggcaggcacaggcgcccactcgtgcttcatgccgtaccacgtcgatgccgtcacgctggtgccgtacggcgacggttggcaggacgagatggcactcggccgcgtcgtcgagggcacattccgtagtctcaacaacctgctcgagcacctgcaccagagtttcttcttctacctgctcatgcacaaggagcattttgtcagcatcggcacatacttgcctagtgccatgttgctgggcgccaactttaccatcatgtccatcctgatgtggttcaagagcgggcagcccgaggaggaggaggagcctgagggtcaggaggccgctaccaatagtggagcctcagtgacatcggaatctcggcctgttgttgagcgtgagcttttggtgccgctgtcggtgataggtacttgcttgttcctcggtgctgtgcctctctatatgtttaaccatctccctgcaggtcttctatatccatccttcatcgccttctcagcaattaacattttcctaccgcccatcgcctcgcagctcctggagactctctactggcccacgacgcagcagtaccagctcatcaagtgcttctacctcctggtcctgggaatgttcatctcgtcgctcgccatcctcaacttctccctcgccttctggatcggcctcatcgccacccccttgacattcacccggcccttcccggcctcgcccgccctccgctgggcctacgtcgccctgctcaacatagcctcccctcccgccgtctttgccgtcgcctgcgccgcctggcgtctggacgtcgctgaagttctgcaggccgctgcctttggctgggatgtctggggaatgtacaccgccgtcgtggtctggtgcgtttggtggcctgcgtggcttgctggttcgctcgtcgtgcttgggaggccggctaccaaggtcaagactgcatga

SEQ ID NO: 142 - protein, 606 aa, Magnaporthe oryzae
MPRLLSTVLSLRRDPRILKLPPYLSVLCIVVGIVSLLLLPLDNFTRRTYISENALLPGQVHTYFAGSDQNVFRAYKHEVNSLVDKSNVEINDKLESIFKGVGLKVGRQNFTYSSSGIQHSGENVYAILQAPRGDATEAIVLVTAWRNPNGELNRNGVALALTLARYFRRWSLWSKDIIFLLPPDSLAGPQAWVDAYHDAHDPRKVAALPLKSGALQGALALDYTREDRYESVHLVYDGVNGQLPNLDLFNSLVHVAGGQMGIGVSIQDMWHHRNDYRDRLQTMLRGMLRQGIGAGTGAHSCFMPYHVDAVTLVPYGDGWQDEMALGRVVEGTFRSLNNLLEHLHQSFFFYLLMHKEHFVSIGTYLPSAMLLGANFTIMSILMWFKSGQPEEEEEPEGQEAATNSGASVTSESRPVVERELLVPLSVIGTCLFLGAVPLYMFNHLPAGLLYPSFIAFSAINIFLPPIASQLLETLYWPTTQQYQLIKCFYLLVLGMFISSLAILNFSLAFWIGLIATPLTFTRPFPASPALRWAYVALLNIASPPAVFAVACAAWRLDVAEVLQAAAFGWDVWGMYTAVVVWCVWWPAWLAGSLVVLGRPATKVKTA

SEQ ID NO: 143 - DNA, 1875 bp, Marssonina brunnea
  misc_feature: Marssonina brunnea f. sp. multigermtubi
atgtccaacgcgccatcagcaccttcgggcgttctgctacggcacaatccattattcctcaaattacctccatatctgtcctttctctgcatagtcattggcgtcgcatggctcctcgtcctaccactgaacgactactcacggaagacatacatttccgagaacgcgctgctgcccggccaggtccacacgtatttcgctgggagcgaccagaatgtgttccgagggtacaagcacgaggttgatgcgctggaggggaggagcaacattgaggtgaacgacaagttggaagagtttttcaaggcctccgggttgaaggttgcaaggcaaagttacaggtacaagtctgcaggggagacgtattcgggggagaacatatacgccatactccatgctcctagaggagatgctacagaagctattgttcttgttggagcttggaagaacattgagaatgaactcaatcgaagtggggtggctctcgttctcactttagcccggtatttcaaaaggtggtctctctggtcgaaggatatcatttttttggtcacagccgatagcacggctggaccgcaggcttgggtcgatgcgtaccacgatactcaccaatctccagccattgactctcttcccttgaagagcggcgcattgcaaggtgctgtcgtaatcgactacccgtttgaccaccgattcgagtctatccatgtcgtctacgacggtaccaacggccaacttcccaacctggacctcttaaacactgtagtatctattgcaagcggtcaaatgggaatcggagtctccttgcaacagatgtggaagcattcggacagctaccacgatagacttcagactatgcttcgagggatgttgaagcaaggcctcggacatgcttccgggcctcacagcagcttcattccctaccatgtagacgccattaccttgcagccttttggagaaggttggcaagatgagatggctatgggaagagtcattgaaagcacgttccgaagtctcaacaacttgctggagcatctccaccagagtttcttcttttacttgctcatgcagtccaatcgatttgtgagcattggaacctacctcccaagcgcgatgcttgtggctgtcaactttactatcatggcaatctttctctggatcaagagcggctcgccaaaaatgtcagccaaagcgtctccatctgaggctgaaaagaagccattggtcatggtaaaggaaggaggaatcaaggctctcgtctcagaggaggttgtcatcgtccgagaaagagagctgtttcttcctctggctattgtagccgccatccaattccttggagtcttacccctttttgttttcaatcacacgcctcagaatatgctgcaagcaatgtttatcttctccgctctactcaattgcgtcctcccctttctcctctcctacgctcttgtaacctacttcgtccctacccggcaacaatacacgctcatcaaagccttctccctcctctttctcggcatgttcctctcggctcttgcaacccttaacttctcgctcgccttcctcataggcctcttttccacccccttaacctacatccagcctctacctcgccatccaatcatggccggcattctagcgatcccattgactatgctagcgcctaccacgatcgtcgtggtgggaacgaaatactggggtttgagtattacccatgtgctgaaggaggcggcgtttggctgggatgtttgggggatgaatacccaggtcatggtgtggtgtgtctggtggcccgcttggttgattgggatgattgtgttgtttgggagaccgagggaagacggcgaggaagttgaggtaaagctcgtgaaaggatag

SEQ ID NO: 144 - protein, 624 aa, Marssonina brunnea
MSNAPSAPSGVLLRHNPLFLKLPPYLSFLCIVIGVAWLLVLPLNDYSRKTYISENALLPGQVHTYFAGSDQNVFRGYKHEVDALEGRSNIEVNDKLEEFFKASGLKVARQSYRYKSAGETYSGENIYAILHAPRGDATEAIVLVGAWKNIENELNRSGVALVLTLARYFKRWSLWSKDIIFLVTADSTAGPQAWVDAYHDTHQSPAIDSLPLKSGALQGAVVIDYPFDHRFESIHVVYDGTNGQLPNLDLLNTVVSIASGQMGIGVSLQQMWKHSDSYHDRLQTMLRGMLKQGLGHASGPHSSFIPYHVDAITLQPFGEGWQDEMAMGRVIESTFRSLNNLLEHLHQSFFFYLLMQSNRFVSIGTYLPSAMLVAVNFTIMAIFLWIKSGSPKMSAKASPSEAEKKPLVMVKEGGIKALVSEEVVIVRERELFLPLAIVAAIQFLGVLPLFVFNHTPQNMLQAMFIFSALLNCVLPFLLSYALVTYFVPTRQQYTLIKAFSLLFLGMFLSALATLNFSLAFLIGLFSTPLTYIQPLPRHPIMAGILAIPLTMLAPTTIVVVGTKYWGLSITHVLKEAAFGWDVWGMNTQVMVWCVWWPAWLIGMIVLFGRPREDGEEVEVKLVKG

SEQ ID NO: 145 - DNA, 1932 bp, Melampsora larici-populina
  misc_feature: Melampsora larici-populina (strain 98AG31 / pathotype 3-4-7)
atgtcaatttactcaaaactcatcaatcgaactcagcaatccaaccaaatcaaaaacaatcaatcaaatcagaatgatagtgagaatgatgataatctagaagaagaaaaagaagaagaagaaatcgatccagaactgaaatcacttatcactagagtcttacgtagaaggaaaatcttcaagtttatcacttctgctactcctatcatcactttattactcatcatcgcaggtttcgtctcagctttgatcttaccgactcatcttctatcaagaggtacttatatatctgaaaatgctattcaacctggtcaagttaacacttactggggttggtctcaggttcacaaagctgataaatatgctgatcaagtagacctctggcgtactctaccatcaaaacaacgagccgaagaaatgcgtcaagctttcgaaagcatgggtttaccttctcaaacacaaacttattcgtttactcatcctcatgcttcaacttcgatcgtcaacggtaccaatgttcatgctaccctacacgcaccacgtaccgatggagctgaggcaatagttctcatggcttcttggttgactcgtaaacccggatcagatgttaaaggaggtgatgtgaatgtacgaggggtggctagcgtactagcacttgcggattaccttctcacttggcttcaagcctatcacgacctgcctcaatccaacctccaaacagaacggatgaaaggtcgttcggggccaatttgggcagcgttatcgattgattacccgttccattcattcagtcacattggaatcttttacgagggtatcaacggacaacttccgaatctagatcttatcaacacagcttcaaacatcatccgttggacgggctcatgtcccgtaacaatccatgatggagttgaccaattatcaacaagcaacagacgatcgaaatttataaacgattacatccttgcttctcaaaccattcttcgacaaatccaatacggactcttaggctcgccatcaggtccagaaggacttttcacaccctatagaatagattcgattggcttgtttgccgtaccagctgaaggaccacatgggtttcatacgattggaaaagttttggaatctactttacgtagtttaaataatttactcgaaaggtttcatcaatcgttttttctttatttgatgatgggagaaaaacgatttgtgagtgttggaaattatttgtttgtaccggttttgatggggattggaatcactttgttatcatttagtttatggggagaattagattttaaagatcagaagaaagaagagattaaagaagaagagaagattgaaaagaagatcggatcggttgatgaggttatgggaaaaaatgataagcaagagggaagtctggtttggtgtattaagatcattacggtttctcatttgattggagctgggtgtttttggagactagttagatcagtagagccaacaaaggtgtatgagtcacccaaactctggctcgtggttggactatggataagtctaccgattgcaatagtaacattggatagtagatcgattaaatcgattaagatgttagagtctatgatcttacttcttgtaggttgtttaatttcagtagtatcagttttaaatttcgcacttggagtaggacttggaattttatttggaccatcattaggattaattccaataatcttacgaaaaagatcggttagattgagtagaggaatcagtttggtttggttgatcggctttggatttctttggatcggattcatcgatttgaaaagtttaatgtttaatgatcagtgtttagggaattggttcttaggcttttggttagtgatcgttttacctttggttttggattggtttgtggttggattaagtggtttggttcatgggtcttga

SEQ ID NO: 146 - protein, 643 aa, Melampsora larici-populina
MSIYSKLINRTQQSNQIKNNQSNQNDSENDDNLEEEKEEEEIDPELKSLITRVLRRRKIFKFITSATPIITLLLIIAGFVSALILPTHLLSRGTYISENAIQPGQVNTYWGWSQVHKADKYADQVDLWRTLPSKQRAEEMRQAFESMGLPSQTQTYSFTHPHASTSIVNGTNVHATLHAPRTDGAEAIVLMASWLTRKPGSDVKGGDVNVRGVASVLALADYLLTWLQAYHDLPQSNLQTERMKGRSGPIWAALSIDYPFHSFSHIGIFYEGINGQLPNLDLINTASNIIRWTGSCPVTIHDGVDQLSTSNRRSKFINDYILASQTILRQIQYGLLGSPSGPEGLFTPYRIDSIGLFAVPAEGPHGFHTIGKVLESTLRSLNNLLERFHQSFFLYLMMGEKRFVSVGNYLFVPVLMGIGITLLSFSLWGELDFKDQKKEEIKEEEKIEKKIGSVDEVMGKNDKQEGSLVWCIKIITVSHLIGAGCFWRLVRSVEPTKVYESPKLWLVVGLWISLPIAIVTLDSRSIKSIKMLESMILLLVGCLISVVSVLNFALGVGLGILFGPSLGLIPIILRKRSVRLSRGISLVWLIGFGFLWIGFIDLKSLMFNDQCLGNWFLGFWLVIVLPLVLDWFVVGLSGLVHGS

SEQ ID NO: 147 - DNA, 2103 bp, Mycosphaerella fijiensis
atgtccaagaagagatctgttgaggcggaacacgaatcgttcgaggagagtgtagagaccgccggggaggactccaaaaggtccggcgaagagcgcgactgtggtgatggtgccatgctcggattcgaagtgttcgaggagcggaagcagggatattatgtttacaataacccacgagtggcgagcggaagcctcaaaagcacgatcacaatggcgctgtctgcgcgcctattggccctccgccggtccccaatcctcctcaaactcccaccatacctgtcccttttatgcattctcattggaatcgcctggctactgctccttcctctgaacgaatactctcgccagacctacatctctgaaaatgccatccttccgggtcaagtccatacatactttggcggatccgagcacaacatcttccgcgcatatcgacaggaggtctggacattgggccagcagagtgatgaagagaggacaaccggcctgaggagagtgctgaacgatattggcttaaagaccgctgtgcaagattggaggtttgaggtagcgggagaaaggatcgagggcaagaatgtttatggtctgctccaaggaccgcgagcagatgctacagaagccatggtcatgattgctgcttggaagaatttcgatggagaagtcaattattctggagtcgcgctggctctgacaatggcgagatacttcaagaggtggagtatatggagcaaggacattttcgtgctcttgccagatgacagcacatatgggccagaagcttgggtgagcgcgtatcacagcacgacggccgtgcctactgcaagcagaaatgtgagcgcgctatcgatcaaggctggagcgttacaaggagccgtggctttagactatccggtcgggccatggggaaagagattcgacaagctggatgtgtactacgatggcataaatggtgctcttcccaaccttgatctcctcaacactgctgtgcaagtcgcgagtgggcagatgggtattggctgcagtctccacggcatcacagatcacaaggacaattacgaagaccgactgaagtgccttgcgaaaggtgtcatgaaacaagctgcaggacatgctactgggccgcattccgcattcatgtcctaccacgtcgatgcgatcacattgaagactgtcggagatggctggcatgacgagatgactctgggacgcgtgacggagagtgtcttccggagcatcaacaatctgttggagaagttccatcaaagtttcttcttctacattctgctcaacacgaatcgattcgtcagcatcggcagctacctcccggcagccatgttggtagccggaagctttacgatcaacgcgctggcactttgggtgttgagcgggaaaggaccagttgagaagccgggcaagcttgaagcacacccaactgacaagcctgagggagagaagatggtggctttcaagagtggcagcgatgtcactttggtggcaaaggaagagcttgaggctgtcgagagaagaatgctcctgcctgcgactgtagttctggccgtgcatctggcgagcgttgtgccgctgtatgcattgacacacgtcgacaaagctagcctcgtattcgccttctccgctgtcgcaattgcaagctatgcattcccggcttatctgagcctgctcttggtgcgcttcatgaacgccagctcgcagcagatccaagtcatgcagtctttctcgctactcttcctcggcgccacgctttcgacctgggctacgatcaacttctcactggcgctcctcgttggtctgcttgcagcacccctcagcttcgctagacccattgtagtggacaggacaaagcacgtacagtttgctctgcatctgcccgcagcactattctggttggtgctgtcaccgcctgcagttctttccggactaagcatgtacactcagaacaatctcagttggatactgctggaaattgcaaaaggctggtccgcacaaggcgcttggagtgatctcgtggtgtggtcagtgtggtggccggcgtgggtgctgggtggaacagtgcttctcagtggcatcgtaagaacaggaccatga

SEQ ID NO: 148 - protein, 700 aa, Mycosphaerella fijiensis
MSKKRSVEAEHESFEESVETAGEDSKRSGEERDCGDGAMLGFEVFEERKQGYYVYNNPRVASGSLKSTITMALSARLLALRRSPILLKLPPYLSLLCILIGIAWLLLLPLNEYSRQTYISENAILPGQVHTYFGGSEHNIFRAYRQEVWTLGQQSDEERTTGLRRVLNDIGLKTAVQDWRFEVAGERIEGKNVYGLLQGPRADATEAMVMIAAWKNFDGEVNYSGVALALTMARYFKRWSIWSKDIFVLLPDDSTYGPEAWVSAYHSTTAVPTASRNVSALSIKAGALQGAVALDYPVGPWGKRFDKLDVYYDGINGALPNLDLLNTAVQVASGQMGIGCSLHGITDHKDNYEDRLKCLAKGVMKQAAGHATGPHSAFMSYHVDAITLKTVGDGWHDEMTLGRVTESVFRSINNLLEKFHQSFFFYILLNTNRFVSIGSYLPAAMLVAGSFTINALALWVLSGKGPVEKPGKLEAHPTDKPEGEKMVAFKSGSDVTLVAKEELEAVERRMLLPATVVLAVHLASVVPLYALTHVDKASLVFAFSAVAIASYAFPAYLSLLLVRFMNASSQQIQVMQSFSLLFLGATLSTWATINFSLALLVGLLAAPLSFARPIVVDRTKHVQFALHLPAALFWLVLSPPAVLSGLSMYTQNNLSWILLEIAKGWSAQGAWSDLVVWSVWWPAWVLGGTVLLSGIVRTGP

SEQ ID NO: 149 - DNA, 1932 bp, Mycosphaerella pini
atggcgctctctgcgcgcctcctcacactgcgaagatcgcccattcttctcaagctcccaccatatctcagtgccctcctgatcctggttggcattgcatggctactcctccttccgcgtaacgaatactcgcggcagacatacatttcagagaatgcgatccttccaggacaggtccacacttacttcggcggtagcgaacacaatgtctttcgagcgtatcgacaagaggtatggaacttgggtcagcacgacgatgcacactacagggtagaaggcttgcaccaaatactgagagagattggtttgaagacggcacggcagacgtacagctacaaagtcgttggcgagacgatatcgggcacgaacgtatatggcttgcttcaagggccacgcgccgatgctaccgaggccatggtcctgatcgccgcatggcggaactttgatggagaggtgaactattctgctgttgccctggcgttgactctggcgcggtacttcaagaggtggagcatctggagcaaggacatcattgttctgctcccggacgatagcacgtatgggccggaagcttgggtctcggcgtatcacagcacgtctaccacaccgacaacatcgcggaacatcagtgcactacccgtcaaagcaggtgcgctgcaaggagcagttgctctggattaccctgtcggaccgtggggcaagcgattcgataagctcgatgtgctctacgacggcatcaacggagcattgcccaatctcgatttgctgaatacagctgtgtctgtcgccagcagtcagatgggcgtcggttgcagcctgcatggcatggatcagcactccgacaagtaccaagaccggctgaagtgcttgacaaagggagtcatgacacaagctgctgggcacgctactggtccacattctgctttcatggcctatcacgtcgatgccatcacgctcaagacggttggcgatgggtggcatgatgagatgagtctcggtcgagtcactgaaagtgtcttccgatcgatcaataacttgctcgagaaattccaccagagcttcttcttctacattctgttgaatacccatcgcttcgtgagcattggcagctatctgccatctgcgatgttgattgcaggtagcttcagcatcaacgcgctggcgttgtgggtcctgagcggtagaggacctaaagaattccctgggcaacaaaagccgactggcggcgccgccgagaagcttaaggagaaagacgttgttgagatcaaggaaggagaagccgttgcgttgattcccaaggctgaactggagactgttgagaggaagatgcttgtgcctgccacggtcgtacttgcggtgcatctcgcgagttgcataccgctgtgggtacttacacatgtgaacaaggcggtgcttccatctgcgcacggcatcgtgacaacactaagctatgtttttgccattgagatcagcgtcgtactcgtccgcaacttcaaagcaacggcgcagcaactgcagatgatgcagtccttctccctgctcttcctcggcgcaacgctctcgacctgggcaactatcaacttttctctggccttgatcgttggtctactagcttcgcctcttagctttgtccggccggcgacctttctcatcatcaaaaatgagaagggtgaacaacaaaactcgccactggacgtgaccctaagcattgtctcctcgctggcatggctgttggcctcgccaccgctcatgatctacgcgctgagccattatctgcatcgtgatcttgggtggatcttgcttgaaatagcaaaaggctggacggcacagggtgtctggagcaaccttgtggtgtggaacgtttggtggccagcttgggtcatagcaggcgctgtgctattcagtaacgtagcacgtgcggccaagttatga

SEQ ID NO: 150 - protein, 643 aa, Mycosphaerella pini
MALSARLLTLRRSPILLKLPPYLSALLILVGIAWLLLLPRNEYSRQTYISENAILPGQVHTYFGGSEHNVFRAYRQEVWNLGQHDDAHYRVEGLHQILREIGLKTARQTYSYKVVGETISGTNVYGLLQGPRADATEAMVLIAAWRNFDGEVNYSAVALALTLARYFKRWSIWSKDIIVLLPDDSTYGPEAWVSAYHSTSTTPTTSRNISALPVKAGALQGAVALDYPVGPWGKRFDKLDVLYDGINGALPNLDLLNTAVSVASSQMGVGCSLHGMDQHSDKYQDRLKCLTKGVMTQAAGHATGPHSAFMAYHVDAITLKTVGDGWHDEMSLGRVTESVFRSINNLLEKFHQSFFFYILLNTHRFVSIGSYLPSAMLIAGSFSINALALWVLSGRGPKEFPGQQKPTGGAAEKLKEKDVVEIKEGEAVALIPKAELETVERKMLVPATVVLAVHLASCIPLWVLTHVNKAVLPSAHGIVTTLSYVFAIEISVVLVRNFKATAQQLQMMQSFSLLFLGATLSTWATINFSLALIVGLLASPLSFVRPATFLIIKNEKGEQQNSPLDVTLSIVSSLAWLLASPPLMIYALSHYLHRDLGWILLEIAKGWTAQGVWSNLVVWNVWWPAWVIAGAVLFSNVARAAKL

SEQ ID NO: 151 - DNA, 1794 bp, Nectria haematococca
atgggtgagctgtccggaaaagcatcggcgttctcgctgcgtcgcgatcctcgaatcttgaagcttcccccttacctgtccttcctttgtatcgcaatcggcgtcgtctggttgttccttcttcctcttaacgaatactcgcgacggacgtacatctcggagaacgcgctgctgccggggcaggtgcatacatattttggagggagtgaacagaacatcttgcgcgcgtatcgtcatgaggttgatgacgtggtgggcaagagcaactacgagattaacgacagacttgacgagatcctgacgggcgttggcctcaaggttggccgtcagaactacacgtatcactcagcgggtcacgaatactcggggcagaacctctatgcgatcctccaagctccccgaggtgatgctaccgaggccattgtcttggttgctgcgtggaagactatcgaggagcagctcaaccgcaatggcgtgtccttggctttgaccctggtccgttactttaagcgttggtcactctggtccaaagatattatccttgttgtccctcctgacagcaagaccggcactcaagcttgggttgacgcataccacgatgctcacaaccctgacctcgtggcgcctctgcctctgaagtctggagctctgcagggcgccatcgccatcgactaccctcaagaggagagattcaaggcagtgcacatcatctatgatggtgtcaatggacagctgcctaacctcgatctcatcaactccattgtcaacatcggcggcggtcagatgggtatccccaccaccatccaggagatgacgcagcacaaggggagctacccggatcgtttgcagaccatgctgcgtggtatgctcaaccagggacttggctacgcggccggtgctcatagcagcttcatcccttaccacgtcgatgctgtgacgttgcagccctatggtgaaggatggcatgatgacatgggcatgggtcgtctcgtcgagggttcgttccgaagtctgaacaatctcctcgagcatctgcaccagagtttcttcttctacctgttgatgcagacggaccgattcgtcagtattggcacttatctgcctagcgccatgctgttggctgccaactttaccatcatggccatatcactctgggtcaagagcggccagtcatcgacaaccgcgcataagcccaaggagaccaagggatctgcttcggctgttgaaactgcgcagtcaggaagggatctcttcctgccacttattattgtcgccatctgccatgctctcccagctgtgcctctttacacctttaaccatcttcctgctggtctactttcacctgcctttgccatcttctctgtcgtctcagccgtcatcccctttgccatctcccgcctgctctcaatcttctccaagcccaccattcagcacttccagatcacaaagtccttctccctgcttgtcctgggcatgtgcctctccaccctcgccactctcaacttctccctcgccttcctcgttggccttctagccagcccgcttagctttgtccagcctgtcaaaaccccagtcctgcggtggtctctggccggcctgctcaacatcgtggcgccatctacggtggtatacgtcgcggctcaggcctggggaatcagcatgaccgacctgttgagtgaggcgagctttggctggaacgtatggggcatgtatacacctgtggtggtttggtgtttgtggtggcctgcttggctcgtgggcatgatcaacgtctttggagaggtttcggcgtag

SEQ ID NO: 152 - protein, 597 aa, Nectria haematococca
MGELSGKASAFSLRRDPRILKLPPYLSFLCIAIGVVWLFLLPLNEYSRRTYISENALLPGQVHTYFGGSEQNILRAYRHEVDDVVGKSNYEINDRLDEILTGVGLKVGRQNYTYHSAGHEYSGQNLYAILQAPRGDATEAIVLVAAWKTIEEQLNRNGVSLALTLVRYFKRWSLWSKDIILVVPPDSKTGTQAWVDAYHDAHNPDLVAPLPLKSGALQGAIAIDYPQEERFKAVHIIYDGVNGQLPNLDLINSIVNIGGGQMGIPTTIQEMTQHKGSYPDRLQTMLRGMLNQGLGYAAGAHSSFIPYHVDAVTLQPYGEGWHDDMGMGRLVEGSFRSLNNLLEHLHQSFFFYLLMQTDRFVSIGTYLPSAMLLAANFTIMAISLWVKSGQSSTTAHKPKETKGSASAVETAQSGRDLFLPLIIVAICHALPAVPLYTFNHLPAGLLSPAFAIFSVVSAVIPFAISRLLSIFSKPTIQHFQITKSFSLLVLGMCLSTLATLNFSLAFLVGLLASPLSFVQPVKTPVLRWSLAGLLNIVAPSTVVYVAAQAWGISMTDLLSEASFGWNVWGMYTPVVVWCLWWPAWLVGMINVFGEVSA

SEQ ID NO: 153 - DNA, 1815 bp, Mycosphaerella graminicola
atcgcatgggtactacttctcccattgaacgaatactctcgtcaaacatacatctccgagaacgcgattcttcctggacaggtccatacatactttggaggcagcgagcacaatgttttccgggcatatcgtcaagaggtgtacaatctgggccaacagccagggacggaagtcaggagagatggtttggtgaagatgatacgggagatgggtctgaagcctgcggtacagccattcagctaccatgtcgctggggagacgatatctgggaacaatgtgtatggactcctccagggacctcgagctgatgctacggaagcaatggtactcatggccgcatggcgcaacttcgacggcgaggtgaattattcgggagtggcattggcattggcgatggcaagatacttcaagcgctggagtatctggagcaaggacatcattttgctcatccctgaggacagcacctatggaccagaagcatgggtgtctgcgtaccacagcacttcagataccattacctcgtcgaggaacgtcagtgctttgcctatcaaagctggagcgttgcaggcggcgatcgctttggactatcccgttgggccatggggtaagcgattcgggaaactggatgtactctacgacggcatcaatggcgctctacccaacctcgatctactgaacaccgcagcctctgtggccagcggccagatggggatgggctgcagtctccacggcatggtagatcattcggacaagtacgaggatcgactgaagtgtcttgcaaaaggagccctgacgcaagccgccggacatgccactggacctcactcggcgttcatgccctatcacatagacgcgatcactttgaagactgtcggagatggatggcacgacgaaatgggtcttggccgagtcaccgagagcgttttccggtctatcaacaacctgctcgagcatctccaccagagtttcttcttctacatcctgctgaacacgaatcgcttcgccagtatcggaagctatctacccgctgccatgctcattgctggcagtttcacaatcaatgcgcttgccctatggattgcgagcggcaaaggtccggtcgagccacctggaaagccgaccgcgagtctgaaggagaaggtgaagcaggaagagacggtagcagtccagactggcgaaggcgtggcgctcgtcccgaaagctgagctggagagtgtggaacgcaagatgtttgtgcctgccattgcattcttggctgtgcacctcctgagtgtggtacctctgcacgtgctaacacacaccccccgagcaagcttgtccttctccttctttgcagtcgcaggctcgacctacctgctcccgctctacttcagcacagtgctcgtccgcttcttgcgagcaagctcccagcagctgcagatcatgcagaccttctcgctcctcttcctcggcgctacactgtccacttgggctaccataaacttctcgctcgcactcatcgtaggcgtgctggcaacaccgcttggcttcgttcgccccctgccattcggaaaaggagacggacaaacaacaatagcacggttggctttaagcatagctgttacagtggcctacttgatcgcttcgccacctgcggcgatatatgccagcagctggtatttgaagaaagatgtttcgtggctgttgatggaggtcgcaaaaggttgggtggcacaaggagtctggagccatttgatgatttggtccgtgtggtggcccgcatggatcctgggcggcattgtcctatacagtggggccgtgcgcccgaagacatga

SEQ ID NO: 154 - protein, 604 aa, Mycosphaerella graminicola
IAWVLLLPLNEYSRQTYISENAILPGQVHTYFGGSEHNVFRAYRQEVYNLGQQPGTEVRRDGLVKMIREMGLKPAVQPFSYHVAGETISGNNVYGLLQGPRADATEAMVLMAAWRNFDGEVNYSGVALALAMARYFKRWSIWSKDIILLIPEDSTYGPEAWVSAYHSTSDTITSSRNVSALPIKAGALQAAIALDYPVGPWGKRFGKLDVLYDGINGALPNLDLLNTAASVASGQMGMGCSLHGMVDHSDKYEDRLKCLAKGALTQAAGHATGPHSAFMPYHIDAITLKTVGDGWHDEMGLGRVTESVFRSINNLLEHLHQSFFFYILLNTNRFASIGSYLPAAMLIAGSFTINALALWIASGKGPVEPPGKPTASLKEKVKQEETVAVQTGEGVALVPKAELESVERKMFVPAIAFLAVHLLSVVPLHVLTHTPRASLSFSFFAVAGSTYLLPLYFSTVLVRFLRASSQQLQIMQTFSLLFLGATLSTWATINFSLALIVGVLATPLGFVRPLPFGKGDGQTTIARLALSIAVTVAYLIASPPAAIYASSWYLKKDVSWLLMEVAKGWVAQGVWSHLMIWSVWWPAWILGGIVLYSGAVRPKT

SEQ ID NO: 155 - DNA, 1485 bp, Phaeosphaeria nodorum
atggtgctcattggcgcatggaagaacatggacgacgtgatcaacaactcgggtgtagccctcgtgctcaccctggcacgctacatgaagcgctggagtctctggagcaaggacgtcatcttcctgatttctggagacagcaccattgggccgcaagcttgggttgatgcgtaccacaacgagcacgacgagcggtacgtggagagcctgaagatcaagagcggggcactacagggcgctgttgccgtcgactatcctgctgggccttggggacatcgctacgacaagctgcacgttgtgtatgatggagtgaatggtcagctgcctaacttggatctgttcaatactgctgttcaggtcgcgggtggacaaatgggcatcgactgttccatccagcgcatgttcggccaggacgacacctacaagcagcgcctcacaaccatggctcgcggcatgctttcccagggtctcggtcacgcgactggccctcattcatcattcatcccataccacgtcgatgccattacgctcgtcaccgtcggcgatggctggcacgacgaaatctctctcggacgaaccgtcgaatcgctcttccgcagcctcaacaacctcctcgagcacctgcaccagagcttcttcttctacctcctcatgcactcgaagcgcttcgtcagcatcggcacatacctcccctccgccatgctgatcgccttcaacttcagcatcaccgcgctcgcactctgggtcaagagcgggcagcccactgaatccgcgaaacccgcacctaccggacgcctaccgcccaaggactcgaagcccgttgcagtagaagataagaaaccgtcttccgaggcttctgagaccgacgtagtcacagatggcaaggacgtgagcatagtccccaagaccacgactgccgtaatcgagcgccccctcctcctccctgtcctcgtcgtcctcgccacccacgccgccggcctggtgcccatgtactacttcaactcgtgggatctcgacatgctgatgggcattttcctaacgagcgcaaacctcgccgtcctcttacccgtcggcctggcatttataaactactacgccctcgaaccatccctgacggcacagcaaatcacgctcattcagtctttctcgttgctgttgctgggtatgttcttggctgcgctggcgacgctgaatttctctctgtcgtttatcattggcgtactcactacgccgctgagtttcgtgcgcaaggtcaaacactctggtttgacgttcttgcagctcggggtgctggtcgtgttgaacccgattatggtggcgcagtggagtgcgtatttgctaggcgcggatctggcagaggtgttgagaataagtgcgattgggtggcatgtttggggtatgtggacgcaggtggttgtgtggattgtttgggcgcctgcgtgggtggtgggtgcgacgattgtggccggggggttgtttgagtga

SEQ ID NO: 156 - protein, 494 aa, Phaeosphaeria nodorum
MVLIGAWKNMDDVINNSGVALVLTLARYMKRWSLWSKDVIFLISGDSTIGPQAWVDAYHNEHDERYVESLKIKSGALQGAVAVDYPAGPWGHRYDKLHVVYDGVNGQLPNLDLFNTAVQVAGGQMGIDCSIQRMFGQDDTYKQRLTTMARGMLSQGLGHATGPHSSFIPYHVDAITLVTVGDGWHDEISLGRTVESLFRSLNNLLEHLHQSFFFYLLMHSKRFVSIGTYLPSAMLIAFNFSITALALWVKSGQPTESAKPAPTGRLPPKDSKPVAVEDKKPSSEASETDVVTDGKDVSIVPKTTTAVIERPLLLPVLVVLATHAAGLVPMYYFNSWDLDMLMGIFLTSANLAVLLPVGLAFINYYALEPSLTAQQITLIQSFSLLLLGMFLAALATLNFSLSFIIGVLTTPLSFVRKVKHSGLTFLQLGVLVVLNPIMVAQWSAYLLGADLAEVLRISAIGWHVWGMWTQVVVWIVWAPAWVVGATIVAGGLFE

SEQ ID NO: 157 - DNA, 1887 bp, Puccinia graminis
atgatagaaaaagaactaccagaagagcaggaggaggaagaggaagaggaagaccaagaatcgattagtctgtcaaagaggttcaatcggagacagcttatcatcaacttcatcttctcatatgcacctcaacttagttcactcctcatcctggctggttatctggctggcttcatcctgcccacagatctactctcacgatcgacttatctctctgaaaacgccatcctaccaggtcaagtcaatacttactggagctgggctcaggttcataaggctgatcgatacgcagatctactcgacgaatggcgtgatttaccatctgaacagcgtgcctcccacatcgcggctctcttccagggcttcggattacgttctcaaactcaatcttacaccttctcctcactcggttctcaagtacattcgatcagcaatggcaccaatgtacatgcgatcctacacgcccctcgtgtcgatggctcagaggcactcgtcctcatggcttcctggctaactcggcgtcctggatcagatatccatggtggtgatatcaacctacgaggagtagccagcgtgttggccctagcagaatatctcatcagcttcaacttatggagtaaagatatcatcttcctgattgccgatgaatacctcgaaggaactcatgcctggttgaaagcctatcacgggctctcccaacccaacttaaagatgcaacctctcgacttgaaaaccggttcaatctgggctgcgctcaacatcgacttcccattccattcttttagtcacatcggcatcgattatgagggtatcaatggccaactacccaacctggacttgatcaatactgtttctcatatcgtccgttggactggctcgtgtcctgtcaccatgcatcatgagccactggaaccaagttatccaagctatcttcccgatcatcccgaggtccagaaatacattcaagcagggcgaacgatcgtcaagcagatgtcacatggtctggtgggctctccatccggtcctgaggggctcttcagcacttatcggatcgatgccatagcactgttcgcccatcctgccgacggccctcatgggttccataccatcggaaatatcgtcgagtcgagcttacgcagtctcaacaacctactcgaacgtcttcaccaaagcttcttcttatacctcttacaatccgaggccagattcttgagcgtagccatgtatctcatcgtacctctcctgatcggtgtcggccttaccatcagaggcctcgctaaatggggagctactgttaaagattggaattcattgtctccatccgaaggacatcaaaatcaaaactcaaaatcgttcgagaaacgcccagtaactgatcaacggggaaatgaaaaaggcgcagaaatcttgtggagcttgcgggtcgctgggatcactcatctcgtgggcgcgatgatttatttgggtctgataaggtccatcgagcctacacatgctaaagagtccgtccagctttatgtttccatcctcatcttcgctatccttcccctggcgatcatcaagctacttccgcctaggagggtaagttcggttgcgattttcgagccgatccagctcatgctctccggctgctttatctccgtcatctctgtcctcaacttcccgctgggcacgggtattggcttcgctcttagcatccatcccctggtcctcctcttcagcctcctcgccctcgccttgttcggacatctagatatctccaaactcgtccatctcttcaggaacgatcaggtccttgacgcttggttcttgcctttcgtcgccatcctctttttgccccttttcgttcaatctcttctcgtccggttgttgaaagctttctattaa

SEQ ID NO: 158 - protein, 628 aa, Puccinia graminis
MIEKELPEEQEEEEEEEDQESISLSKRFNRRQLIINFIFSYAPQLSSLLILAGYLAGFILPTDLLSRSTYLSENAILPGQVNTYWSWAQVHKADRYADLLDEWRDLPSEQRASHIAALFQGFGLRSQTQSYTFSSLGSQVHSISNGTNVHAILHAPRVDGSEALVLMASWLTRRPGSDIHGGDINLRGVASVLALAEYLISFNLWSKDIIFLIADEYLEGTHAWLKAYHGLSQPNLKMQPLDLKTGSIWAALNIDFPFHSFSHIGIDYEGINGQLPNLDLINTVSHIVRWTGSCPVTMHHEPLEPSYPSYLPDHPEVQKYIQAGRTIVKQMSHGLVGSPSGPEGLFSTYRIDAIALFAHPADGPHGFHTIGNIVESSLRSLNNLLERLHQSFFLYLLQSEARFLSVAMYLIVPLLIGVGLTIRGLAKWGATVKDWNSLSPSEGHQNQNSKSFEKRPVTDQRGNEKGAEILWSLRVAGITHLVGAMIYLGLIRSIEPTHAKESVQLYVSILIFAILPLAIIKLLPPRRVSSVAIFEPIQLMLSGCFISVISVLNFPLGTGIGFALSIHPLVLLFSLLALALFGHLDISKLVHLFRNDQVLDAWFLPFVAILFLPLFVQSLLVRLLKAFY

SEQ ID NO: 159 - DNA, 1593 bp, Puccinia striiformis
atggcgtggattcgattcagtacagtaaaacgtgctactcagatcaagcgactccttcagagtttcggattacgatctcagacccaatcctacgcattcagctcgataggaacggacagtcaaattatcagtaatggtaccaacgtccatgcgatcttacatgctccacgtaccgacggatctgaggcactcgtactcatggcttcatggcaaaccagaaaacctggctcagatatccgcggtgctaatatcaacgtgcggggtgtagctagtgtattagctctggctgaatatctcatcactttcaacctctggagtaaagatatcatcttcttgattgccgatggttatctagatgggactcatgcatggctaaaagcctatcatggactctctcaatcgaatctgaaaatggaagctttggaattgaaaactggctcgatttgggccgcactcaacatcgactttccattccattcattcagtcatatcggaattgattatgagggtatcaacggacaattacccaacctagacctcatcaatacagttgcacatatagtccgatggacgggatcatgtccagtaacgatgcattcagagccactagagccgagttatccatcttatttaccagaccatccggaggtacaaagatactttcaagcaggaagaacgattatcaaacagatgagctatggactcacaggctcaccatctggaccagaaggcttattcagcacctacagaatcgacgcgatctctctctttgcttatcctgctgatggcccccatgggtttcatactatcggtactattatcgaatctagtcttcgtagcttaaataatctattagaacgtcttcaccaatctttcttcttatatcttttacaatctgaatctaaattcctcagtgtggctatgtatcttatcgtcccgcttttgatcggcatagggctgactatcaaaggcttggccaaatggggtattgctaatcaagaatgggaaaaactttcgtctctacaaatcaatcagaaatctctcctttctccagagaaatttggacttggaactcccaatattcagttcgaaaatcagaaaggagatgaaattatttggagcttatccgttatcggtttcactcatcttgtcggtgctttagtctatacaagtttgatcagatacatcgatccaaaccaagccagaaattccgttcaaatatacctatctcttctgattttgaccagtttaccattgctgattctgaagttcaatccaccccgaaaaatgaaaacggtgatgatctttgaaccgattcaattgatgttatccgggtgtttcatatcggttatttctgtcttgaattttccattgggtgttgggatcggattcgttctctctatccatcctttcgccgtgattgcttctgctcccctggctttcttcttcttcttttttgatggtagagacctttcgggggtattgtacaatcatatcgtccacgaggcttggttcttgcccgtttttgttaccctaatcgctcctttactcgtccattcggttatcgttagacttcttaaaactttctattga

SEQ ID NO: 160 - protein, 610 aa, Puccinia striiformis
MENEIKRFNRRKLLTSFITSHATQLSSLLILAAYLAGFILPTDLLSRSTYLSENAILPGQVNTYWSWDHVHKADRYADLVDQWRGFDSVQRATQIKRLLQSFGLRSQTQSYAFSSIGTDSQIISNGTNVHAILHAPRTDGSEALVLMASWQTRKPGSDIRGANINVRGVASVLALAEYLITFNLWSKDIIFLIADGYLDGTHAWLKAYHGLSQSNLKMEALELKTGSIWAALNIDFPFHSFSHIGIDYEGINGQLPNLDLINTVAHIVRWTGSCPVTMHSEPLEPSYPSYLPDHPEVQRYFQAGRTIIKQMSYGLTGSPSGPEGLFSTYRIDAISLFAYPADGPHGFHTIGTIIESSLRSLNNLLERLHQSFFLYLLQSESKFLSVAMYLIVPLLIGIGLTIKGLAKWGIANQEWEKLSSLQINQKSLLSPEKFGLGTPNIQFENQKGDEIIWSLSVIGFTHLVGALVYTSLIRYIDPNQARNSVQIYLSLLILTSLPLLILKFNPPRKMKTVMIFEPIQLMLSGCFISVISVLNFPLGVGIGFVLSIHPFAVIASAPLAFFFFFFDGRDLSGVLYNHIVHEAWFLPVFVTLIAPLLVHSVIVRLLKTFY

SEQ ID NO: 161 - DNA, 1881 bp, Puccinia triticina
atggccagccgaagacggactgctgaagagccggcgcaggatggtggccaggcggcgatcagtctgaccaacaggttcaagcgcagacagcgggtgatcaccttcctcttcgcctgtgcgccccaactcagctcgctcctcgttctggcgggatatatcgctggcctcatcctgcccaccgatcttttggcccgctcgacctatctgtcagaaaacgccatcctgcccggtcaagttaatacctattggaactgggatcaggttcataaggctgatcgatacgcagacctggtcgaccaatggcgtgatttaccatctgaacagcgtgctgctcagattgaccatctcttccgaagctttggattacgttctgaggctcagtcctacaccttctccttcctcggctctaacccgcattcaatcagcaacggcaccaatgtccatgcgatcttacacgctcctcgtaccgatggctcagaggcactcgtcctcatggcttcctggctaacccgacgacctggctcagatatccgcggtggtgacatcaatgtacgaggcgtagccagcgttttggccctagcagaatatcttatcagcttcaacctatggagcaaagatatcattttcttgatagccgatgaatacttagaagggactcatgcctggttaaaggcctatcacggcctctcccaaccgaacttgaaaatgaaacctctcggcttgagaaccggttcgatctgggcggcgctcaatattgacttcccattccattcatttagtcacattgccatcgattatgagggtattaatggtcaattgcccaacttggacctgatcaatacggttgcccatatcgtccggtggactgggtcgtctcccgtcacgatccatgacgaaccactggagccaagctatccaagctacgttcccgatcatcccgaggtcctgaaatacctccaggcagggcagacgatcatcaagcagatgtcacacggcatcgtgggctcgccttctggtcctgaaggcctcttcagcacttatcggatcgacgccatagccctgtttgcccaccccgccgatggcccccatgggttccatacgttgggaaatatcgtcgagtccagcttacgcagtctcaataatctcctcgaacgtctccaccagagcttcttcctttatctcttacaatccgaggctaggttcctgagcgtagcaatgtatctcatcgtacccctcctaattggtgtcggcctgaccatcagaggccttgctaaatggggcacttcgctccaagagtcggattcaccatcctcagctgaaaagcgtcaaaatccgaactcgaaaacaatagagaaacatacaattacaggtaaatcaaggaacgaaaaaggcgcagaaatcttgtggagcttgcgggtcattggtaccatccatctcgtcggtgcgatggtttactggggtctgatcaagtccattgagccgacccatcccaaagagtctatccagctatacgcttccatccttatcttcgccaccctgcctctggcgatcatcaagctcctcccacccccgaggatcagttcggttgcaatcttcgagccaatccagctgatgctctcaggctgctgtatctcggttgtctctgtcttaaactttcccctaggcactgccatcggctgtgttctcagcattcaccccatcggcctcctgctcatcctaatcaccctcgccaccctcgggaaatttgatatctccaacctctcacatctcctcaggaacgatcaggtccttgacgcttggttcttatccttcctcttcctcctcctcttgcccctcttcgttcaatctctgcttgttcgatggttaaaaactttctattaa

SEQ ID NO: 162 - protein, 626 aa, Puccinia triticina
MASRRRTAEEPAQDGGQAAISLTNRFKRRQRVITFLFACAPQLSSLLVLAGYIAGLILPTDLLARSTYLSENAILPGQVNTYWNWDQVHKADRYADLVDQWRDLPSEQRAAQIDHLFRSFGLRSEAQSYTFSFLGSNPHSISNGTNVHAILHAPRTDGSEALVLMASWLTRRPGSDIRGGDINVRGVASVLALAEYLISFNLWSKDIIFLIADEYLEGTHAWLKAYHGLSQPNLKMKPLGLRTGSIWAALNIDFPFHSFSHIAIDYEGINGQLPNLDLINTVAHIVRWTGSSPVTIHDEPLEPSYPSYVPDHPEVLKYLQAGQTIIKQMSHGIVGSPSGPEGLFSTYRIDAIALFAHPADGPHGFHTLGNIVESSLRSLNNLLERLHQSFFLYLLQSEARFLSVAMYLIVPLLIGVGLTIRGLAKWGTSLQESDSPSSAEKRQNPNSKTIEKHTITGKSRNEKGAEILWSLRVIGTIHLVGAMVYWGLIKSIEPTHPKESIQLYASILIFATLPLAIIKLLPPPRISSVAIFEPIQLMLSGCCISVVSVLNFPLGTAIGCVLSIHPIGLLLILITLATLGKFDISNLSHLLRNDQVLDAWFLSFLFLLLLPLFVQSLLVRWLKTFY

SEQ ID NO: 163 - DNA, 1953 bp, Pyrenophora teres
  misc_feature: Pyrenophora teres f. teres (strain 0-1)
atggctttgctctcctggttattggcgctgcggcaagacaaacgcctgctcaagcttccgccttatctttctgcgctgtgtataatcgttggaataggatggctgctcgtgcttccgctaaacgagtactcccggaggacgtatatttccgagaatgcgctcttacccggccaagtacacacgtactttacaggcagcgagcacaatgtctttagagcttatcgccatgaggtccacggactgattgacaagcctatcgcagaacggtcccagcgactggaagccatcttccgcgaacagaatctcaaagtcgcaacccagcactacaactacaccgtgtcaaaccggactattacaaacgaaaacgtctatgctatccttcaaggtcctcgcgccgacgctactgaagccattgtgctaattggagcatggaagaacatggcagacgaagtcaacaactctggtgtcgcattggtccttactttggcccgctacttcaagcgctggagtctctggagtaaggacattatcttcctcgtaccgggtgacagcaccattggttcgcaagcttgggtcgatgcatatcacgaggaacacgatcagcgatatgtcgagagcttaaagatcaagagcggggcattacagggcgctgttgcagtcgactatcctgcgggtccatggggccaccgatacgacaaattgcatatagtgtatgacggagtaaacggccaacttccgaacctcgatttgttcaacactgcagttaatattgcaaatgggcagatgggcatcagctgtgtgatccagcgcatgtgggaccacagtgattcgtacaaggagcgactccagactatgcttcgaggcatgctttcgcaaggtctaggccacgcgactggaccgcactcttccttcataccataccatgtcgacgccattacacttgtcacggttggtgacggctggcatgacgagatatccctgggcaagactattgaatcgctcttccggagcttgaacaacttgctggaacattttcaccagagtttcttcttctacctcttgttgcaggacaagcgcttcgtcagcataggcacatacctcccttcagccatgctgattgccataaatttcagcattgctgccatggcactatgggtcaagagtggacgcgccacagaaccaactcccaatcccgcttctacaaagccgcagaagctttcatccagcaaacccgctgcagaaaagccaacccagtcgtctgaagacaaggtgccggaaaaagaagacgccaaacaaaaagactcgaccgcaaaagccggtgaccccgcaaccgaagtcgtcgaaaaagatggcgccctagccatcgtccctaaaccagcaaccataataacagaacggcatctcctcctccccctcctccttgtcctcaccgcccatgccgcaggtcttgtccccctctacctcttcaacaactgggacgcgccccgcctcgccggcctcttcgtcacagcctgcaacgtaaccacactcctcccccttctcatcaccttcctcttcttctggtccgaccccaacatcttctcgccacaggtcctttgcctgatccagtgtttttctctgctgctactaggcatgttcctcgctgctttggctacgctcaacttctcgctgtcggtgctggttggcgtggcgtgtgtgccgctgagttttgtacgcagttcgagtaatatgggggtcaatgcggggcagttgctcgtgctggcactgctgaacccttgtctggtggtgcagacggggtccaagatactgggggccagtctggcagaggtgcttgtgcagtctgctattggatggcatgtgtgcggtatgtggacgcaggtggtgttttggttggtgtggttccccgcgtggctcacgggcgccgtggtggttgctactggtatatgggaatag

SEQ ID NO: 164 - protein, 650 aa, Pyrenophora teres
MALLSWLLALRQDKRLLKLPPYLSALCIIVGIGWLLVLPLNEYSRRTYISENALLPGQVHTYFTGSEHNVFRAYRHEVHGLIDKPIAERSQRLEAIFREQNLKVATQHYNYTVSNRTITNENVYAILQGPRADATEAIVLIGAWKNMADEVNNSGVALVLTLARYFKRWSLWSKDIIFLVPGDSTIGSQAWVDAYHEEHDQRYVESLKIKSGALQGAVAVDYPAGPWGHRYDKLHIVYDGVNGQLPNLDLFNTAVNIANGQMGISCVIQRMWDHSDSYKERLQTMLRGMLSQGLGHATGPHSSFIPYHVDAITLVTVGDGWHDEISLGKTIESLFRSLNNLLEHFHQSFFFYLLLQDKRFVSIGTYLPSAMLIAINFSIAAMALWVKSGRATEPTPNPASTKPQKLSSSKPAAEKPTQSSEDKVPEKEDAKQKDSTAKAGDPATEVVEKDGALAIVPKPATIITERHLLLPLLLVLTAHAAGLVPLYLFNNWDAPRLAGLFVTACNVTTLLPLLITFLFFWSDPNIFSPQVLCLIQCFSLLLLGMFLAALATLNFSLSVLVGVACVPLSFVRSSSNMGVNAGQLLVLALLNPCLVVQTGSKILGASLAEVLVQSAIGWHVCGMWTQVVFWLVWFPAWLTGAVVVATGIWE

SEQ ID NO: 165 - DNA, 1539 bp, Pyrenophora tritici-repentis
  misc_feature: Pyrenophora tritici-repentis (strain Pt-1C-BFP)
atggctttgctctcctggttattggcgctgcggcaagacaaacgcctgctcaagcttccgccttatctttccgcactgtgtataatcgttggaatagggtggctgcttgtgcttccgctgaacgagtactcccgaaggacgtatgtttctgagaatgcgctcttaccaggccaagtacacacgtactttaccggcagcgagcacaatgtcttcagagcctatcgccatgaggtccacggactgattgacaagcctatcgccgaacggtcccagcgacttgaagccatcttccgcgaacagaacctcaaagtcgcaacccagcactacaactacaccgtgtcaaaccgtaccattacaaacgaaaacgtctatgccatcctccaaggtcctcgcgccgatgctaccgaagccattgtgctaattggagcatggaagaacatggcagacgaagtcaacaattctggtgtcgcattggtcctgactttggctcgctacttcaagcgctggagtctctggagtaaggacatcatcttcctcgtacccggtgacagcaccattggctcgcaagcttgggtcgatgcataccatgaggaacacgatcagcgatatgtcgagagcttaaagatcaagagtggggcattacagggcgctgttgcagtcgactatcctgctggtccatggggccaccgatacgacaaattgcacatagtctatgacggagtaaacggccagcttccgaacctcgatctgttcaacactgtagtgaacattgcaaatgggcagatgggcgtcagctgtgtgatccagcgcatgtgggatcacagtgattcgtacaaggagcgactccagactatgcttcgaggcatgctttcgcaaggtctaggccacgcgactggaccgcactcttccttcataccgtaccatgtcgacgccattacgcttgtgaccgtcggcgacggttggcatgacgagatgactctcggcaagacgattgaatcgctcttccgaagcttgaacaacttgctggaacatttccaccaaagtttcttcttctacctcttgctgcaggacaagcgcttcgttagcataggcacatacctcccttcggccatgctgatcgccatcaacttcagcatcgccgctatggcattatgggtcaagagtggacgcgccacagaaccaattcccaatcccgcctctacaaagccgcagaagccctcatccagcaaacccgctgcagaaaagccaactcaatcgtccgaagacaaggagtccgaaaatgaaaacgccaaagaaaaagactccattgtgaaagctgatgagcccgcaaccgaactcgtcgaaaaagatggcgccctagccgtcgtccccaaaccagcaaccacaataacagaacggcatctcctcctccccctcctcctcgttctcaccgcccacgccgcaggtctaatccccctctacctcttcaacaactgggacgcccctcgtctctccggcctcttcatcacagcctgcaacatcgaagaatatgggggttaa

SEQ ID NO: 166 - protein, 512 aa, Pyrenophora tritici-repentis
MALLSWLLALRQDKRLLKLPPYLSALCIIVGIGWLLVLPLNEYSRRTYVSENALLPGQVHTYFTGSEHNVFRAYRHEVHGLIDKPIAERSQRLEAIFREQNLKVATQHYNYTVSNRTITNENVYAILQGPRADATEAIVLIGAWKNMADEVNNSGVALVLTLARYFKRWSLWSKDIIFLVPGDSTIGSQAWVDAYHEEHDQRYVESLKIKSGALQGAVAVDYPAGPWGHRYDKLHIVYDGVNGQLPNLDLFNTVVNIANGQMGVSCVIQRMWDHSDSYKERLQTMLRGMLSQGLGHATGPHSSFIPYHVDAITLVTVGDGWHDEMTLGKTIESLFRSLNNLLEHFHQSFFFYLLLQDKRFVSIGTYLPSAMLIAINFSIAAMALWVKSGRATEPIPNPASTKPQKPSSSKPAAEKPTQSSEDKESENENAKEKDSIVKADEPATELVEKDGALAVVPKPATTITERHLLLPLLLVLTAHAAGLIPLYLFNNWDAPRLSGLFITACNIEEYGG

SEQ ID NO: 167 - DNA, 1926 bp, Scerotinia borealis
  misc_feature: Sclerotinia borealis F-4157
atggcattgctgtcaaccgtcttacgacatgcgccggtccgcaagttaccgccatatttatcctttctttgcatagccattggtgttgcatggctgctacttctgcctttaaacgactactcgaggaatacttatgtttcggaaaacgcactgctgccgggtcaggtccacacttattttgcgggaagcgatcagaatgtttttcgggggtacaagaaggaggttgatgccttgggggagagtagtaatgttgaggtgaatgataagctcgaggaattttttaaggctaccggactcaaggtggcgagacaaaagtacgagtacaaatcggcgggtgaggtttatagaggagagaatgtatatgctatcctacatgcaccccgaggtgatgctaccgaagcaattgtactcgtaggggcttggagaaatatcgatggggagttgaatcgaagtggtgttgctttggttcttactctggcgagatatttcaatcggtggtctttgtggtcaaaggatataatattcctcattacggcagatagtaaagctggccctcaggcctgggtcgatgcttatcacgacacacaccagtcccccgccatcgattcattgccggtcaagagcggagcccttcaaggagctgttgtaatcgattatccttttgatcaccgttttgaatcgatccatatcgtctacgatggagccaacggccaacttcctaacctcgatctcttcaacacggtagtctccattgctagtggccaaatgggcattagagtctcacttcagaaaatgtgggagcacagcgatagctaccaagatcgactcaaaaccatgttacgcggtatgattaatcaaggtttaggtcatgcttccggccctcatagtagtttcatcccatatcatgtggatgcgatcacactccaaccatttggagaaggctggcaagatgagatggctatgggaagagtaatcgagagtacttttcgaagtttgaataacctgttggaacatctccatcaaagtttcttcttctatctactgatgcaagctaatcgcttcgtgagtattggtacatatcttccaagtgccatgctggtggctacaaattttactattatggctatttacctatgggcgaagagtggttggcctagtcctgcaaagacaaaagctttgtcaataacgaacaatggggaagagaaggagaaaactcccttggctttcgtggaagccggtgacacaaaagcgctcatcccacaaaaagatctccaagggcgcgaacgcaaactctttcttcctttggctgttgtagctggatgccagttcctgggactggttcctcttcatatcttcaatcatacttctaaagccaatctccccatagtcttcgccatcttcctagtcctcaacacattcctccctctagccctctccaccctcctccactcctcctactgcacaccccccaccccccaccaactctccctcatccaatccttctctctcctcctcctcggcatgtacctctcatccctcgctaccctcaatttctccctctccatcatcattggtatcctatcctcccccttatcatacatccgtccactcggacataaacctatacttgccgccatcctccttatatcattaggagttcttgcgccttcaactgtattgcttgtgggagcgaaatactggggtttggatgtcggcgatgtattggtagaagcagcttttggatgggatgtaggggggatgacgacgcaggtcgtggtttggtgtgtttggtggccggcgtgggtggtgggtggtatgttactttttgggaggcctagggaggaggaagaagaagaagaagagaagaagaatgtggaaaggagtggggggaaggtagaggtagaggtagaagtagagaagaattag

SEQ ID NO: 168 - protein, 641 aa, Scerotinia borealis
MALLSTVLRHAPVRKLPPYLSFLCIAIGVAWLLLLPLNDYSRNTYVSENALLPGQVHTYFAGSDQNVFRGYKKEVDALGESSNVEVNDKLEEFFKATGLKVARQKYEYKSAGEVYRGENVYAILHAPRGDATEAIVLVGAWRNIDGELNRSGVALVLTLARYFNRWSLWSKDIIFLITADSKAGPQAWVDAYHDTHQSPAIDSLPVKSGALQGAVVIDYPFDHRFESIHIVYDGANGQLPNLDLFNTVVSIASGQMGIRVSLQKMWEHSDSYQDRLKTMLRGMINQGLGHASGPHSSFIPYHVDAITLQPFGEGWQDEMAMGRVIESTFRSLNNLLEHLHQSFFFYLLMQANRFVSIGTYLPSAMLVATNFTIMAIYLWAKSGWPSPAKTKALSITNNGEEKEKTPLAFVEAGDTKALIPQKDLQGRERKLFLPLAVVAGCQFLGLVPLHIFNHTSKANLPIVFAIFLVLNTFLPLALSTLLHSSYCTPPTPHQLSLIQSFSLLLLGMYLSSLATLNFSLSIIIGILSSPLSYIRPLGHKPILAAILLISLGVLAPSTVLLVGAKYWGLDVGDVLVEAAFGWDVGGMTTQVVVWCVWWPAWVVGGMLLFGRPREEEEEEEEKKNVERSGGKVEVEVEVEKN

SEQ ID NO: 169 - DNA, 1794 bp, Sclerotinia sclerotiorum
  misc_feature: Sclerotinia sclerotiorum 1980 UF-70
atgtttttcgagggtacaagagggagattgacgctttgggggaaagtagtaatgttgagtatgtgtgaaagctgccgcagcgcattacgattgaaggatatgaagctgatgttggcgtacagagttaatgataaactggaggaattcttcaaagctacgggacttagggttgcgagacaaaagtacgagtataaatctgcgggtgagattcacagaggagagaatgtgtatgcgattttacatgcacctcgaggtgatgccacagaagcaattgtgttggtagcggcttggagaaatattgatggagagttgaatcgaagtggtgttcctttggttcttactctggcgagatatttcaatcgttggtctttgtggtcaaaggatattatattcctcattacagcggatagtaaagctggtcctcaggcttgggttgatgcctatcacgatactcaccagtcgcctgctgttgaatcgctgcctgtcaagagtggagctcttcaaggagctgttgtgattgactatccgtttgatcatcgctttgaatcgatccatatcgtctacgatggaattaacggccaacttcctaatctcgatctcttcaacaccgtagtctcaattgctagtggccaaatgggtatcagagtctcattacagaaaatgtggcagcacagcgatagctaccaagatcgactcaagactatgttacgcggtatgatcaatcaaggattaggtcatgcttcgggacctcatagcagttttattccatatcatgtggatgccatcacactccaaccatttggagatggttggcaagatgagatggccatgggaagagtaatcgaaagtacatttcgaagtctgaacaacttgttggaacatctccatcaaagtttcttcttctatttattgatgcaagctaatcgcttcgtgagtatcggaacttatctcccaagtgctatgcttgtggctacaaactttactattatggctatttacctatgggtgaaaagtggttggcccagtcctgcgaagacgaaatcattgatgtctacggaaaagggcgaagagaaggagaagactcctttagtgatcgtggaagccggtgatgcaaaggcactcatcccacaaaaagatctccaagtccgcgaacgcaaactctttctacctctagctgttgtagctggatgtcaattcttaggacttgttcctctttccatatttaaccatacatctaaagccaacctccctgcagtcttcatcgtcttctccatcctcaacacattcctccccctagccctctccaccctcctccattccagatactgcacaccccccacaccccaccaactatccctcatccaatccttctccctcctcctcctcggcatgtacctctcctccctcgctaccctcaacttctccctctcaatcctcatcggtatcctatccacccccttatcatacattcgtccactgggccacaaacccatcctcgcttctatactcgctatactgctaggtgtattagcgccttcaactgtattgcttgtgggagcaaagtattggggtttggatgtgggagatgttttggtagaagcggcttttggttgggatgtttgggggatgacgacccaggtggtggtttggtgtgtttggtggcctgcgtgggtggtgggtggtatcttgctctttggaaagccgagggatgaggaagatgagagggttgatgggagtgcgtatgcggtcaaagggaaggtgggggaggtgagggatggactagagaaaagataa

SEQ ID NO: 170 - protein, 597 aa, Sclerotinia sclerotiorum
MFFEGTRGRLTLWGKVVMLSMCESCRSALRLKDMKLMLAYRVNDKLEEFFKATGLRVARQKYEYKSAGEIHRGENVYAILHAPRGDATEAIVLVAAWRNIDGELNRSGVPLVLTLARYFNRWSLWSKDIIFLITADSKAGPQAWVDAYHDTHQSPAVESLPVKSGALQGAVVIDYPFDHRFESIHIVYDGINGQLPNLDLFNTVVSIASGQMGIRVSLQKMWQHSDSYQDRLKTMLRGMINQGLGHASGPHSSFIPYHVDAITLQPFGDGWQDEMAMGRVIESTFRSLNNLLEHLHQSFFFYLLMQANRFVSIGTYLPSAMLVATNFTIMAIYLWVKSGWPSPAKTKSLMSTEKGEEKEKTPLVIVEAGDAKALIPQKDLQVRERKLFLPLAVVAGCQFLGLVPLSIFNHTSKANLPAVFIVFSILNTFLPLALSTLLHSRYCTPPTPHQLSLIQSFSLLLLGMYLSSLATLNFSLSILIGILSTPLSYIRPLGHKPILASILAILLGVLAPSTVLLVGAKYWGLDVGDVLVEAAFGWDVWGMTTQVVVWCVWWPAWVVGGILLFGKPRDEEDERVDGSAYAVKGKVGEVRDGLEKR

SEQ ID NO: 171 - DNA, 1485 bp, Septoria nodorum; identical to SEQ ID NO: 155

SEQ ID NO: 172 - protein, 494 aa, Septoria nodorum; identical to SEQ ID NO: 156

SEQ ID NO: 173 - DNA, 1965 bp, Setosphaeria turcica
  misc_feature: Setosphaeria turcica (strain NY001)
atggccctgctctaccaagcatcgctgctggcgctccggcaagataagcgcctgctcaagataccgccctacctctcggccctcctgattgtcgtgggcatcggatggctgctggtgcttccgctgaacgagtactcgcgccgcacctacatctcggagaacgcccttcttcccggccaggtacacacgtactttaccggcagcgagcacaacgtctttcgcgcctaccgccatgaggtccacgccctgaaggacaggcccgttgcagaacgctctgcgaagctcgaggcgattttccgcgaacagaacctcaaggtcgcaacacagcattacaactatacggtctcgaaccgcacaatcgcaaacgaaaacgtctatgccattctgcagggaccgcgcgccgacgccacggaggccattgtgctcatcggagcatggaccaacatggaggatgagatgaacaactccggcgtcgcattggttctcacgctggcgcgctacttcaagcgctggagtctgtggagcaaggacatcatcttcctcattcccggcgacagcacaatcggatcacaggcctgggtcgacgcataccacgaggcacacgacacgcgctatgtcgaggggttgaagatcaagagcggggcattgcaaggcgcggttgctgtcgactatcccgctggtccatggggccaccgatacgacaagctgcatattgtgtatgatggcatcaacggccagcttcccaaccttgatttgttcaacactgcagtccaaattgcgtctggccagctgggcattggatgcgtgattcagcgcatgtgggaccatggcgactcgtacaaggagcgccttcagaccatgcttcgaggcatgctttcgcaaggtctgggccacgcaactgggcctcattcgtcgtttattccgtaccatgttgatgccatcacgctggtgactgttggcaatggctggcacgacgagatgtcgcttggaaagactgtcgaatcgctgttccgcagcttgaacaacctcctcgagcacttccaccagagcttcttcttctacctcttactgcaagacaggcgctttgtcagtattggtacatacctcccgtcggccatgatgattgccatcaacttcagcatcgccgcaatggcactgtgggtcaagagcggacgcatccaagacacggttgaaaaccccgccgctacaaagccacaggccggaaaacctgcaaagccagccccgaccgagaagaagggccctgaaaaggaagaagccaaggaggagcccaaagaagaggacgccaagaaacaagacacagccaaaaagtctgaacccgccaccgaaatcgtccaaaaagacggctccctcgcagtcgtccctgcagagtccacaaaagtaacagaacgccacctcctattccctcttgtcctcgtcctcgccgcccacgccttgggtctgattccgctgtacctcttcagcaactgggacagcgaccacctgccaggcctcttcatcacggcctgcaacatcacgacactcttccccgtcgccgtcacctttctcgtgtactggtctgcccccgagatcctcacgccgcaggccctatgtctcctccaatgcttctccctgctcctcctcggcatggttctcgccgcgcttgccacgctcaatttctccctcagcgtcatcgtaggcgtcgcctgcgtgcccctgagctttgtccgcaaaacagcgcataacggactcacgggtctgcagctccttattctcgccgtgctcaaccccctcttggtcgtccagacgggcacaaagatcctcggtgccgacctcatgcaggtcctggtgcagagtgctattggctggcatgtctggggcatgtggacccaggtggtgtattggctcgtttggttccctgcatggcttgttggcgctattgttgtttcgacgggtatgtgggagtaa

SEQ ID NO: 174 - protein, 654 aa, Setosphaeria turcica
MALLYQASLLALRQDKRLLKIPPYLSALLIVVGIGWLLVLPLNEYSRRTYISENALLPGQVHTYFTGSEHNVFRAYRHEVHALKDRPVAERSAKLEAIFREQNLKVATQHYNYTVSNRTIANENVYAILQGPRADATEAIVLIGAWTNMEDEMNNSGVALVLTLARYFKRWSLWSKDIIFLIPGDSTIGSQAWVDAYHEAHDTRYVEGLKIKSGALQGAVAVDYPAGPWGHRYDKLHIVYDGINGQLPNLDLFNTAVQIASGQLGIGCVIQRMWDHGDSYKERLQTMLRGMLSQGLGHATGPHSSFIPYHVDAITLVTVGNGWHDEMSLGKTVESLFRSLNNLLEHFHQSFFFYLLLQDRRFVSIGTYLPSAMMIAINFSIAAMALWVKSGRIQDTVENPAATKPQAGKPAKPAPTEKKGPEKEEAKEEPKEEDAKKQDTAKKSEPATEIVQKDGSLAVVPAESTKVTERHLLFPLVLVLAAHALGLIPLYLFSNWDSDHLPGLFITACNITTLFPVAVTFLVYWSAPEILTPQALCLLQCFSLLLLGMVLAALATLNFSLSVIVGVACVPLSFVRKTAHNGLTGLQLLILAVLNPLLVVQTGTKILGADLMQVLVQSAIGWHVWGMWTQVVYWLVWFPAWLVGAIVVSTGMWE

SEQ ID NO: 175 - DNA, 1956 bp, Setosphaeria turcica
  misc_feature: Setosphaeria turcica (strain 28A)
atggccctgctctcatcgctgctggcgctccggcaagataagcgcctgctcaagataccgccctacctctcggccctcctgattgtcgtgggcatcggatggctgctggtgcttccgctgaacgagtactcgcgccgcacctacatctcggagaacgcccttcttcccggccaggtacacacgtactttaccggcagcgagcacaacgtctttcgcgcctaccgccatgaggtccacgccctgaaggacaggcccgttgcagaacgctctgcgaagctcgaggcgattttccgcgaacagaacctcaaggtcgcaacacagcattacaactatacggtctcgaaccgcacaatcgcaaacgaaaacgtctatgccattctgcagggaccgcgcgccgacgccacggaggccattgtgctcatcggagcatggaccaacatggaggatgagatgaacaactccggcgtcgcattggttctcacgctggcgcgctacttcaagcgctggagtctgtggagcaaggacatcatcttcctcattcccggcgacagcacaatcggatcacaggcctgggtcgacgcataccacgaggcacacgacacgcgctatgtcgaggggttgaagatcaagagcggggcattgcaaggcgcggttgctgtcgactatcccgctggtccatggggccaccgatacgacaagctgcatattgtgtatgatggcatcaacggccagcttcccaaccttgatttgttcaacactgcagtccaaattgcgtctggccagctgggcattggatgcgtgattcagcgcatgtgggaccatggcgactcgtacaaggagcgccttcagaccatgcttcgaggcatgctttcgcaaggtctgggccacgcaactgggcctcattcgtcgtttattccgtaccatgttgatgccatcacgctggtgactgttggcaatggctggcacgacgagatgtcgcttggaaagactgtcgaatcgctgttccgcagcttgaacaacctcctcgagcacttccaccagagcttcttcttctacctcttactgcaagacaggcgctttgtcagtattggtacatacctcccgtcggccatgatgattgccatcaacttcagcatcgccgcaatggcactgtgggtcaagagcggacgcatccaagacacggttgaaaaccccgccgctacaaagccacaggccggaaaacctgcaaagccagccccgaccgagaagaagggccctgaaaaggaagaagccaaggaggagcccaaagaagaggacgccaagaaacaagacacagccaaaaagtctgaacccgccaccgaaatcgtccaaaaagacggctccctcgcagtcgtccctgcagagtccacaaaagtaacagaacgccacctcctattccctcttgtcctcgtcctcgccgcccacgccttgggtctgattccgctgtacctcttcagcaactgggacagcgaccacctgccaggcctcttcatcacggcctgcaacatcacgacactcttccccgtcgccgtcacctttctcgtgtactggtctgcccccgagatcctcacgccgcaggccctatgtctcctccaatgcttctccctgctcctcctcggcatggttctcgccgcgcttgccacgctcaatttctccctcagcgtcatcgtaggcgtcgcctgcgtgcccctgagctttgtccgcaaaacagcgcataacggactcacgggtctgcagctccttattctcgccgtgctcaaccccctcttggtcgtccagacgggcacaaagatcctcggtgccgacctcatgcaggtcctggtgcagagtgctattggctggcatgtctggggcatgtggacccaggtggtgtattggctcgtttggttccctgcatggcttgttggcgctattgttgtttcgacgggtatgtgggag

SEQ ID NO: 176 - protein, 652 aa, Setosphaeria turcica
MALLSSLLALRQDKRLLKIPPYLSALLIVVGIGWLLVLPLNEYSRRTYISENALLPGQVHTYFTGSEHNVFRAYRHEVHALKDRPVAERSAKLEAIFREQNLKVATQHYNYTVSNRTIANENVYAILQGPRADATEAIVLIGAWTNMEDEMNNSGVALVLTLARYFKRWSLWSKDIIFLIPGDSTIGSQAWVDAYHEAHDTRYVEGLKIKSGALQGAVAVDYPAGPWGHRYDKLHIVYDGINGQLPNLDLFNTAVQIASGQLGIGCVIQRMWDHGDSYKERLQTMLRGMLSQGLGHATGPHSSFIPYHVDAITLVTVGNGWHDEMSLGKTVESLFRSLNNLLEHFHQSFFFYLLLQDRRFVSIGTYLPSAMMIAINFSIAAMALWVKSGRIQDTVENPAATKPQAGKPAKPAPTEKKGPEKEEAKEEPKEEDAKKQDTAKKSEPATEIVQKDGSLAVVPAESTKVTERHLLFPLVLVLAAHALGLIPLYLFSNWDSDHLPGLFITACNITTLFPVAVTFLVYWSAPEILTPQALCLLQCFSLLLLGMVLAALATLNFSLSVIVGVACVPLSFVRKTAHNGLTGLQLLILAVLNPLLVVQTGTKILGADLMQVLVQSAIGWHVWGMWTQVVYWLVWFPAWLVGAIVVSTGMWE

SEQ ID NO: 177 - DNA, 1911 bp, Sphaerulina musiva
  misc_feature: Sphaerulina musiva (strain SO2202)
atggcgcttgcggcgcgcctgctgaccctccggcggtctcctatcctcctcaaactgccaccatacctctctgcgatatgcatcctggtcggcataacatggcttctccttctgccactgaacgaatactctcgacagacgtacatttccgagaacgcgatcctccccggccaggttcacacttactttggcggcagcgaacataacatctttcgcgcatatcgacaggaggtgcacgatctcggtcagagaagctctgcagagaggatagaaggtatcgagaggattatcaaggagatcaacctcaagagcgcaactcagcgatatggatttgaagtggcaggagaaaaaattgagggcacaaatgtatatggcctgcttcaaggacctcgagcagatgccactgaagcgatggtcctgattgcagcatggaagaattttgaaggcgagatcaactactctggcgtagctcttgctttgactatggcgcgctacttcaagaggtggagcatctggtccaaggacgtgattctcctgattccagaggacagcacatacggccctgaagcatgggtgagtgcataccacagcaccgatatagcttccaccacgagcaggaacatcagcgctctaccgattaaagcgggggcactacaaggtgctgtggcactggattatcccgtgggaccttgggggaaacgtttcgacaagctggatgtcctttacgatggcatcaatggcgcactcccgaatcttgacctcatcaatactgcagttcagattgcgtcgggacacatgggcattggatgctccttgcatggcctgaccaagcactctgacaaatatcccgatcgactgcgaacgatcgcctcggggattctatcacaagcacaaggcgttgcgactggtccacattcagctttcatgccatatcacgtcgacgcgattacattgaagacggtcggagacggctggcatgacgagatgagtctgggacgggtcacggaaagtgttttcagaagtatcaacaatctgttggagcatttgcatcagagtttcttcttttacattttgatgaacacgaatcgatttgtgagcatcggaagctacttacctgctgcgatgttggtggcagggagtttcacgattaatgcgctggcactctggattctcagtggcaggggccccgtacagaaacctggaaaactggagagtgaagggaacgtgaagcccaagggcgagaagctggtcacgatcaaagacggaggggtggtggctgttgtggcgagggaagaggtgcagagcgtggagagaaggatgttcttgcccgctgttgtcgtggtgggcacgcatctgctcagtatgatacctctgtatctgctgacgcatacgagtaaggctaaactgccttatgcgttcggcattatcaccaccagcagttacatacttccagtctatctctcgatcctcctggtccgatatgctcgcacgtcttcgcagcagctgcagaccatgcagtctttctcgctgctcttccttggcgccacactttcgacgtgggccactctcaatttctcgctggcacttaccgtaggcttgctcgcctgtccgctcggctttgtgcggccactgcctctgcggtcctcggcaggcatcagcgacaagcagcgtaatcttgccgtcgctctgagtgtccccacgactctgctctggctcgctctttctcctcctgcgacgctctacgcgctgagctggtacttgaatatggacgtcggcgggatactgtttgaggttgccaagggctgggtagcacaaggtgtctggagctgtcttgtgctgtggagtgtatggtggcctggctgggttctggctggagttgtgctctttagcggcgctgtcaggacagactga

SEQ ID NO: 178 - protein, 636 aa, Sphaerulina musiva
MALAARLLTLRRSPILLKLPPYLSAICILVGITWLLLLPLNEYSRQTYISENAILPGQVHTYFGGSEHNIFRAYRQEVHDLGQRSSAERIEGIERIIKEINLKSATQRYGFEVAGEKIEGTNVYGLLQGPRADATEAMVLIAAWKNFEGEINYSGVALALTMARYFKRWSIWSKDVILLIPEDSTYGPEAWVSAYHSTDIASTTSRNISALPIKAGALQGAVALDYPVGPWGKRFDKLDVLYDGINGALPNLDLINTAVQIASGHMGIGCSLHGLTKHSDKYPDRLRTIASGILSQAQGVATGPHSAFMPYHVDAITLKTVGDGWHDEMSLGRVTESVFRSINNLLEHLHQSFFFYILMNTNRFVSIGSYLPAAMLVAGSFTINALALWILSGRGPVQKPGKLESEGNVKPKGEKLVTIKDGGVVAVVAREEVQSVERRMFLPAVVVVGTHLLSMIPLYLLTHTSKAKLPYAFGIITTSSYILPVYLSILLVRYARTSSQQLQTMQSFSLLFLGATLSTWATLNFSLALTVGLLACPLGFVRPLPLRSSAGISDKQRNLAVALSVPTTLLWLALSPPATLYALSWYLNMDVGGILFEVAKGWVAQGVWSCLVLWSVWWPGWVLAGVVLFSGAVRTD

SEQ ID NO: 179 - DNA, 3561 bp, Ustilago maydis
  misc_feature: Ustilago maydis 521
atgtcatccgtttcatccatggcatggctccgtcgcgtctgtctcgacgactatggctataattttgccctgcctgccctgacgatcgtgtcagcagtactttcagaggccgtcattcgacgcgtcagcttcaccgagatcgacttccaaacgtatctcggccaagctgctctctacctcgatggcgagcgcgactactccaacctcgatccaccaggcggaagcggcccttgcgtctatcctgccgctcacatctacctgtactccttctttcactggctcacacacgcaggcggaaacattttaccagcgcaacatgtcttcgcagcaaccttgacagcaaacaatctgctcgtggccatgctgtatcgccaggcaggtatgcctcctcttgccgtcctgcccttgatactgtcaaagaggatttactcgatcttcttgctacgcatgttcaacgaccccatcgccgttctgtttgtctatcttgcgctctttgcagctaccaactcaagatggaagctctccgctctacttttcagcttcggattgggcatcaagatgaatgtacttctcttcctccctggctttgctgccgctgcattcgtctacacaggcatccgaggtgctatctcctacatagccgtcgtcattgtcgtacaagctctgctctctgcaccgttcactttgcatgatccgcatgcctacctcacacgagcattcgacttttccagatcgtttctccacgtctggaccgtcaactggcgattcgtccccgaggatacattcttgtctcagcattttgcctgcggacttctttcgctccatattgtcctcctcaccctctttggcctcttccgctggacaggcatagcctctcacggtcccaagtggatcttgcagaacctctcagccagatcgcacaagctcgtgcagtctgaaaagaccgccttgatgtgctgtgcttttacctcaaataccatcggcattctctgctctcggagcttgcattaccagttctactcatggtacttccatcaggttcccctgctgttatggctttctcagctgcctaacatcgtcaaattgatattgccagtcgtgctggaatggtgctggaacgtctttccctccaccgatacatcgtcgctgctgctcttggcgtgccatgtcgtgcttgtgcttggctgcttcaccatgcccggcctagttacagccaagcgtcctctctcttccattgctcaagacgacgacggagccgaagtggaagccttgctcttgacggacgatctccgtctcagcaagccgtccgagccagattcaaagacggcctcaacatcaaacgatccagccgacgtgcgcgaagaggctctgctgcgtctcgcacaagctcgaaaagccaaggcagcaaaggaagcaaagctacgagacgcctttcgacgtcgcatcgctacccgccgccgtgtgctggcactcctcggcaaactattgcttctgctccgcccaatccttgtactggcaagcattgtcctgattctcgtcttgccacacccacagtcacccgtgtcgaaaggcacctacgtcgacgagaatgctcttcagcctggtcaagcccgcgtctattgggactatttcgacgtcacttacgccgacatgctctccgaaaaggtgtctttcttgaaagatgcaagcagtgcagagcgtgctgactttgttttccgggagctccaatcatatggtctagaagttaaccgtcagcactacaaatacgactcgatccccctccatcacggctcggcgctatccggtatcaacgtgtatgcgagatcagctacaccccgcattgatggccgtgaagccatcattctcacagcaagctggcgtagccgatggcaaggtgctgatgacccctttccgcctgccgagaatctcgacgagaccgtcagtatcgatcaaagagggcgcatcaatgtacgcggtgtcgcctctatccttgctctagcccgctatctgaccacgcaagcccatttgagcaaagacctcatctttgtcatctccgacggccatcttgaaggcatccatgcctggtcttctgcctactttggcagcaagtccgaaggactccaggtggatccggtgtcggctggaggctcgcaggtgtggaacgcaatctccatcgactatccctctgactctttctcgtcgctcgaggttcaatacgagggcttcgatggccaattaccaaacatggatgtcgtcaacacgatcgttcgcatcgcagatactgtgactggcggaatgccgttaaccttcggtctgaggtctgcccccttacacctcaaagagccagtgcagaggctggcccagaaatggggcattcgtctacgttcggatgttgagtacgagctcggcaactacgaaaatggtgtacgtgcagcgcttagacaagtaggcttcggtgtcacgggacgggctagtggtccacacggcttcttccagcgacatcacgttgatgcaatcaccctctacgctgtccccgctactggtccatacggattcttccatatgggcagactcgtcgagtcattcgttcgctctatgtcgaacttgctcgagcggctgcatcactctcagttcttctatttactcctcaaccctcgtcgatttgtccccatcggcacggcgatcttggtgccgctcttgctgtccatctcgctcaccatcagcggtctcgcgctatggttcgctgaggagaaggtctccaagcaggagcgcgaggctattttctcaggcctggatccatctgcgggcgatgacggtgatatgcagccagagacaccaacgatgagctggtatcgaaatcagattgtgcagaatcacttcactgcagttgaaggtgaagatgcggcggacaggaaaacgaacgaatatggagttgcactgagggagtcaatgaggccgattgcgactacgctcgcctgcgttggcttgaccgtgctggcgggtgtaggcgttctgttgcgaaacgatcttctttttgcagagatgtcaggaggactgacaaagcggggaaaacagttgggtgcagcaagagtagtcatcatgctcttgccaatagccggggcagtcctccttcgctctcgctgcggcatcaagcgtgcacatcggatcgggtcgcttttgatcgcctttgcatacctccaggccgggatgctggtggctgtcttgagcgtgctgaatttcgctttggctgccttcctcgcacttctcacatacagtgcactcagaatcgcctccggcagaccaagttcgagtcctctaactgaagctgttcctgcccactcctgggttaatttcattcgaggtctggcagtcatggtgttcagccccgtcttctgggccgcactgctgctgcagttcctccgcagagagacgctgcagcatgaggtcagcgcgctcgtcttgcactggaaactgtacaatgcggccactgtaccgatactatgtgtagcttatctgcctattgtcctgcaggctcagctaggcgcgttccttagagtctaa

SEQ ID NO: 180 - protein, 1186 aa, Ustilago maydis
MSSVSSMAWLRRVCLDDYGYNFALPALTIVSAVLSEAVIRRVSFTEIDFQTYLGQAALYLDGERDYSNLDPPGGSGPCVYPAAHIYLYSFFHWLTHAGGNILPAQHVFAATLTANNLLVAMLYRQAGMPPLAVLPLILSKRIYSIFLLRMFNDPIAVLFVYLALFAATNSRWKLSALLFSFGLGIKMNVLLFLPGFAAAAFVYTGIRGAISYIAVVIVVQALLSAPFTLHDPHAYLTRAFDFSRSFLHVWTVNWRFVPEDTFLSQHFACGLLSLHIVLLTLFGLFRWTGIASHGPKWILQNLSARSHKLVQSEKTALMCCAFTSNTIGILCSRSLHYQFYSWYFHQVPLLLWLSQLPNIVKLILPVVLEWCWNVFPSTDTSSLLLLACHVVLVLGCFTMPGLVTAKRPLSSIAQDDDGAEVEALLLTDDLRLSKPSEPDSKTASTSNDPADVREEALLRLAQARKAKAAKEAKLRDAFRRRIATRRRVLALLGKLLLLLRPILVLASIVLILVLPHPQSPVSKGTYVDENALQPGQARVYWDYFDVTYADMLSEKVSFLKDASSAERADFVFRELQSYGLEVNRQHYKYDSIPLHHGSALSGINVYARSATPRIDGREAIILTASWRSRWQGADDPFPPAENLDETVSIDQRGRINVRGVASILALARYLTTQAHLSKDLIFVISDGHLEGIHAWSSAYFGSKSEGLQVDPVSAGGSQVWNAISIDYPSDSFSSLEVQYEGFDGQLPNMDVVNTIVRIADTVTGGMPLTFGLRSAPLHLKEPVQRLAQKWGIRLRSDVEYELGNYENGVRAALRQVGFGVTGRASGPHGFFQRHHVDAITLYAVPATGPYGFFHMGRLVESFVRSMSNLLERLHHSQFFYLLLNPRRFVPIGTAILVPLLLSISLTISGLALWFAEEKVSKQEREAIFSGLDPSAGDDGDMQPETPTMSWYRNQIVQNHFTAVEGEDAADRKTNEYGVALRESMRPIATTLACVGLTVLAGVGVLLRNDLLFAEMSGGLTKRGKQLGAARVVIMLLPIAGAVLLRSRCGIKRAHRIGSLLIAFAYLQAGMLVAVLSVLNFALAAFLALLTYSALRIASGRPSSSPLTEAVPAHSWVNFIRGLAVMVFSPVFWAALLLQFLRRETLQHEVSALVLHWKLYNAATVPILCVAYLPIVLQAQLGAFLRV

SEQ ID NO: 181 - DNA, 3579 bp, Ustilago hordei
tcagatgttaagcaaagctgctaactgagcctgaacgacaatcggcagataagcgaggcagacaatgggcactgttgccgaaccaaagagcatccaatgcatcattgcttgctcgaatgcgaccttaaaggatcctcctccaagggtttgcaccatgcgcagagctagtacccacatgaccgggtgcaacatggacatcaccacgaatcgcaaccagcctaccaccgccgagcatttccaagaggcgatgcgaagagcagagtaagttccaagtgctagaaccgttgcctgtgccaagttgagcacgcttagtagtgcgacgagcaagcctgcttgtagataggcgaaagcgagaaggagtgagctcatgcggttgcatcgtatagttgtggtgcgaatgcgaatcatgaatgcgcctgctggtgcgagtgccatgactcctatggaagctagagtgatgagttgccactgtgcaaggtctttcgttgaatccagagctgaagtagcgagagtgtcggcatggtacagcactgctgcacctagcaccaatgttgaagctacgcatgctagcgctgcaccgtttggtcggatcgagtctcgcaatgcatctgcaaactcgtgcaatcttgttgccactttctcattgccctcctcctcttcgacagccaagatcctctggacgaggtgattgcgataccatgccaaagtaggattgtctggcatcacatcttgctcggcaggcatgtacttttctgccttcagagcttccaatctgagcaaaagagcctctctttcagccttggaccgtttcccctcatcaaaccacttggccaatccactaatcgtcaaggaaatcgacaagaacagaggcaccaaaatcgccgtcccaatcggaacgaacctgctcggattgagaagcagataaaagaactgcgaatgatgcagtctctcaatcaaattcgacatggatctgacgaaagactcaatcactcgacccatgtgaaagaatccatagggtccagtagctggaacagcatagatagtaatcgcatcgacatggtttcgttgaaaaaacccgtgtggcccactcgcttgtcccacaacgccaaaccaaagctgtcgtattgctgaactaagaccatcttggtagcgatgcaatccgtactccacatcaggccgcaagctcaggcccgatcgtttagccaaatccagaacggcctctttaaggagcgacttgctcgactgagcagccaaggatatgggtatgcttccagcaacatgttgagcgattcgaacgatggtgttgataacatccatgttgggtagctgaccatcgaatccttcgtactgcacttggagcgaagagaaagaatccgaggggtaatcgattgagatagcattccacacttgtgagcctgcatgagctactgcttctacttgaaggccgggtgggatattgccgaagtaggccgaagaccaagcatgaatgccttggagatgtccgtcgctgatgacaaagatcaggtctttgctgagatgtgcttgagtggtgagatagcgtgcgagggcgaggatggaggcgataccacggacgttgatctggcctctcgtgtcgaatgtcgtccgagtcgcgttggcggtggcggctgtaggtgcaaaagggtcgtcctcaccaagccacctactcctccaactcgcggtgagaatgacagcctctctaccatcgatacgcggagttgcagacctagcatacacattggtacccgacagtaccgtcttgttccctggcaaaagtttatcatagttgaactgctgtctgtggacatctaacccatacgactgcagctgggagtagacaagatcagcacgctctgcactgcttgcatccctcaaccgcgaaattttttccgagagcatatcggcgtaggtgacgtcgaagtagtcccagtagactcttgcttgggccggttgtagggcattttcgtcgacataagtgccttttgaaacaggtgactgcggatgtggcacgacaaagataagtgcaagagcgaggatgactagcagtggtcgaaggaggagcgagaagcggccaagcagggctagcactctacggcgagtggcaatacggcgttggaaagccttgcgaagctttgcttctttagccgccttggccgcgcgtgcttctgccagacgttggagggcatcgtcgtgctcgatgggttcgtcatttgaaacagaagtagtgtcgagatgagctgctaccgcttgcttgcggatgggacgaaggccatcattggaaaggagcgcgtcaacctcgtcttgttcatcttcttgttgtgttgataatatcctctccgtctctgctgtacttgtcggccctggcaaagtgaagcaggccgagacgaggaaaagatgacaaactagcagaaccaacgaggagttctcggtcgaaggaaagacgttccagcaccactccaatgccacaggcacgacaagcttcaacaccaccggtagcttcgagaaccacaagagcagtgggacctggtgaaagtaccacgagtagaactgataatgcaagctccgggagcaaaggatgccaatgacgttggaggtgaatgcagtgccaaggatggctactttcgcccttcgatccagtgcggacgtctgcttggagagattgttgaagatccatcgagggccctgggtgccgatagcagtccagcggaagaggccaaagatagcaagcaaagcgagatgtattgcaaggagacccttcgcaaaaggctgagacaagaaggtcttctcgtcaacaaagcgccagttgaccgtccagacgtagaggaaggctcttgaaaagtcaaaggcatgcgctaggtaagcatgtgcatcgtgccatgtgaaaggtagcgagatgagcacctgcacaacggcaatgatcgatgtgtacgagactgcacctgcgagaccggtgtaagcgaaggcagcggcagcgatgccaggaaggaaaagaaggacgttcatcttgacacccaatcccaagctgaacaacagggccgaaagcttccatcttgcgttgatggctgcgaagagtgcaacatagacaagaaagatggcgatgggatcgttgaacattcgaagcagaaagatcgaagagatacgcttggacagtatcaagggcaggactgcgattggtggcattcctacttgacggtaaagcaggcccacgatgagattgttggccgtcaatagacctgcgaagactttttgggcgggtaggatgtttttcccgccatcagtgagccagtggaagaaagagtagacgtagagatgggcagcagggtagacgcaaggaccgctacctccctccgggttgaggttggcatagtggcgttcaccctgtagaaagagtgctgcctggccgacgtaggtctggaagtcgatctcggtgaagctgatgcgtcgaagaacaacttgggagagcgcagctgagacgatggcgagggcagcaagggaaaatgtgtagccatagtcgtcgaagcagacgcggtgcagccaggcgaccgcagaggaagacgacat

SEQ ID NO: 182 - protein, 1192 aa, Ustilago hordei
MSSSSAVAWLHRVCFDDYGYTFSLAALAIVSAALSQVVLRRISFTEIDFQTYVGQAALFLQGERHYANLNPEGGSGPCVYPAAHLYVYSFFHWLTDGGKNILPAQKVFAGLLTANNLIVGLLYRQVGMPPIAVLPLILSKRISSIFLLRMFNDPIAIFLVYVALFAAINARWKLSALLFSLGLGVKMNVLLFLPGIAAAAFAYTGLAGAVSYTSIIAVVQVLISLPFTWHDAHAYLAHAFDFSRAFLYVWTVNWRFVDEKTFLSQPFAKGLLAIHLALLAIFGLFRWTAIGTQGPRWIFNNLSKQTSALDRRAKVAILGTAFTSNVIGILCSRSLHYQFYSWYFHQVPLLLWFSKLPVVLKLVVPVALEWCWNVFPSTENSSLVLLVCHLFLVSACFTLPGPTSTAETERILSTQQEDEQDEVDALLSNDGLRPIRKQAVAAHLDTTSVSNDEPIEHDDALQRLAEARAAKAAKEAKLRKAFQRRIATRRRVLALLGRFSLLLRPLLVILALALIFVVPHPQSPVSKGTYVDENALQPAQARVYWDYFDVTYADMLSEKISRLRDASSAERADLVYSQLQSYGLDVHRQQFNYDKLLPGNKTVLSGTNVYARSATPRIDGREAVILTASWRSRWLGEDDPFAPTAATANATRTTFDTRGQINVRGIASILALARYLTTQAHLSKDLIFVISDGHLQGIHAWSSAYFGNIPPGLQVEAVAHAGSQVWNAISIDYPSDSFSSLQVQYEGFDGQLPNMDVINTIVRIAQHVAGSIPISLAAQSSKSLLKEAVLDLAKRSGLSLRPDVEYGLHRYQDGLSSAIRQLWFGVVGQASGPHGFFQRNHVDAITIYAVPATGPYGFFHMGRVIESFVRSMSNLIERLHHSQFFYLLLNPSRFVPIGTAILVPLFLSISLTISGLAKWFDEGKRSKAEREALLLRLEALKAEKYMPAEQDVMPDNPTLAWYRNHLVQRILAVEEEEGNEKVATRLHEFADALRDSIRPNGAALACVASTLVLGAAVLYHADTLATSALDSTKDLAQWQLITLASIGVMALAPAGAFMIRIRTTTIRCNRMSSLLLAFAYLQAGLLVALLSVLNLAQATVLALGTYSALRIASWKCSAVVGWLRFVVMSMLHPVMWVLALRMVQTLGGGSFKVAFEQAMMHWMLFGSATVPIVCLAYLPIVVQAQLAALLNI

SEQ ID NO: 183 - DNA, 1785 bp, Verticillium dahliae
  misc_feature: Verticillium dahliae VdLs.17
atgtcgcgccttatctcttcagcactctccatcagacgcgaccctcgcctactcaagctgcctccatatctatcccttctctgcattattggagggatagcttggctctttcttctgccactcaacgattactcgcgaaggacatatatatccgagaatgcgttgctccctggccaggtgcacacttacttcgctggtagcgatcaaaatgtcttccgaggatacaagcacgaaattgatgggcttgcgggcaagagtaattacgagatcaataattacctggaagccctgcttcaaagctttggcatgaaggttggccgtcaaaattacacatacgagtcgtcgggatttgagtatgccggcgaaaacctttacgctatcctacaagccccccgcggcgacgctaccgaagccatcgtcctcgtcgcagcttgggagaacactgatgggatgcgcaatactataggggtgccacttgcattgacactggcgcgctacttcaaacgatggtcattatggtccaaagacataatcctggtcatgccaccagacagtacaaccgggacgcaagcctgggtggatgcttatcatgacgcccatgatccggcgcgagttgcgtccttgccaatcaaatcaggcgcactacagggtgctatcgccatcgatttcgcacaagagcatcgtttcaagaacatacacatcgtctatgacggagtgaacggccaactccccaacctggatctcatcaatgccgttaacagtatttccaacggtcagatgcacatgccaacactcatccaaaatatgtggaaacactccgacaagtataatgaccgcctgcgtactatgcttcgcggaatgctgaagcagggcctaggctatgcgtctggtccccacagcagcttcatcccctatcacgttgatgctgttacacttcagccctttggcgatgggtggcaagatgaaatggccatgggccgtctcattgaagggtcgttccgtagcctcaacaacttgctggaacacctgcaccaaagcttcttcttctacctgcttatgaataaggatcgcttcgttagtattggcacatacctgcccagtgccatgattcttgctgcaaacttcagcatcatgtcaatattcttctgggtcaagagcggttaccgggagcctggagatggttcacagaaatctgggtcaggccctggttcagccggctcaacaacggttcaaagagaactcttcgtaccccttttggctgtgacgataagccagttcctaggggtctttcctctcttccttttcaaccatctgccagcaaacctgctctccgtggctttctcagcttttgcggttctgaactgtattcttccttcagtgctatccttcattttaaagacagcataccagcccactttgcagcactatcagctcatcaaatgcttctcgctgcttctgctgggcatgttcctgtcggctctggctacgttaaatttctcgcttgcatttttcattgggctgctcgccagtcctttgaccttcgtgcaaccatggcccaagaacgacttcgccagatatgcatcttcggcactgttgcaactcgtgtctccaacggcggtgatgttttccgcaacagctttctttggtctagatgttggagaggtgttgcggaacgcagcatttggatggaatgtatggggcatgtatacgcctgtagtcatctggtgtgtttggtggcctgcgtggatcgcggggtcggtgatggttcttgggcctacttcttga

SEQ ID NO: 184 - protein, 594 aa, Verticillium dahliae
MSRLISSALSIRRDPRLLKLPPYLSLLCIIGGIAWLFLLPLNDYSRRTYISENALLPGQVHTYFAGSDQNVFRGYKHEIDGLAGKSNYEINNYLEALLQSFGMKVGRQNYTYESSGFEYAGENLYAILQAPRGDATEAIVLVAAWENTDGMRNTIGVPLALTLARYFKRWSLWSKDIILVMPPDSTTGTQAWVDAYHDAHDPARVASLPIKSGALQGAIAIDFAQEHRFKNIHIVYDGVNGQLPNLDLINAVNSISNGQMHMPTLIQNMWKHSDKYNDRLRTMLRGMLKQGLGYASGPHSSFIPYHVDAVTLQPFGDGWQDEMAMGRLIEGSFRSLNNLLEHLHQSFFFYLLMNKDRFVSIGTYLPSAMILAANFSIMSIFFWVKSGYREPGDGSQKSGSGPGSAGSTTVQRELFVPLLAVTISQFLGVFPLFLFNHLPANLLSVAFSAFAVLNCILPSVLSFILKTAYQPTLQHYQLIKCFSLLLLGMFLSALATLNFSLAFFIGLLASPLTFVQPWPKNDFARYASSALLQLVSPTAVMFSATAFFGLDVGEVLRNAAFGWNVWGMYTPVVIWCVWWPAWIAGSVMVLGPTS

SEQ ID NO: 185 - DNA, 1785 bp, Verticillium alfalfae
  misc_feature: Verticillium alfalfae VaMs.102
atgtcgcgccttatctcttcagcactctccatcagacgcgaccctcgcctgctcaagttgcctccatatctgtcccttctctgcattattggagggatcgcttggctctttcttctgccactcaacgattactcgcgaaggacgtatatatccgagaatgcgttgctccccggtcaggtgcacacttacttcgccggtagcgatcaaaatgtcttccgaggatacaagcacgagatcgatgggcttgcgggcaagagtaattacgagattaataattacctggaagccttgcttaaaagctttggaatgaaggtcggccgtcaaaattacacgtacgagtcgtcaggatctgagtatgccggcgagaatctttacgctatcctacaggccccccgcggcgacgctaccgaagccatcgttctcgtcgcagcttgggagaacactgatgggattcgcaataccatgggggtgccgcttgcattgacactggcgcgttacttcaaacgatggtcattatggtccaaagacataatcctggtgatgccaccagacagtacaaccgggacgcaagcctgggtggatgcttatcacgacgcccatgatccggcgcgagttgcttccttgccaatcaaatcaggtgcactacagggtgctatcgccatcgatttcgcacaggagcatcgtttcaagaacatacacatcgtctatgacggagtgaacggccaactacccaacctggatctaattaatgccgttaacagtatctccaacggtcagatgcatatgccaacactgatccaaaatatgtggaaacactccgacaagtataatgaccgcttacgtaccatgcttcgtgggatgctgaagcaaggcttgggctatgcatctggtccccacagcagcttcattccctatcacgttgatgctgttacacttcagccctttggtgatgggtggcaagatgaaatggccatgggccgtctcattgaaggctcgttccgtagcctgaacaacttgctggaacacctgcaccaaagcttcttcttctacctgcttatgaataaggatcgcttcgtcagcattggcacatacctgcccagtgccatgattcttgctgcaaactttagcatcatgtcaatattcttctgggtcaagagcggccacaaggagtctggacatggttcagagaaatccgggtcaggccctggttcagccggctcaacaacggttcaaagagaactcttcgtaccccttttggctgtgacgataagccagttcctaggggtctttcccctcttcctcttcaatcatctgccagcaaacctgctctccgtggctttctcagcttttgcggttctgaactgtgttcttccttctgtgctatcctacattttaaagacagcataccagcccactttgcagcactatcagctcatcaaatgcttctcgctgcttctgctgggcatgttcctgtcggctctggctacgttgaatttctcgctcgcatttttcattgggctgcttgccagtcctctgaccttcatgcaaccatggcccaagaacgacttagccagatatgcatcttcggcactgttgcaactcgtgtccccgacggcagtgatgctttcagcaacagctttctttggtctagatattggagaggtgttgcggaacgcagcatttggatggaatgtatgggggatgtatacgcctgtagtcatttggtgtgtttggtggcctgcatggatcgcggggtcggtgatggttcttgggcctacttcttga

SEQ ID NO: 186 - protein, 594 aa, Verticillium alfalfae
MSRLISSALSIRRDPRLLKLPPYLSLLCIIGGIAWLFLLPLNDYSRRTYISENALLPGQVHTYFAGSDQNVFRGYKHEIDGLAGKSNYEINNYLEALLKSFGMKVGRQNYTYESSGSEYAGENLYAILQAPRGDATEAIVLVAAWENTDGIRNTMGVPLALTLARYFKRWSLWSKDIILVMPPDSTTGTQAWVDAYHDAHDPARVASLPIKSGALQGAIAIDFAQEHRFKNIHIVYDGVNGQLPNLDLINAVNSISNGQMHMPTLIQNMWKHSDKYNDRLRTMLRGMLKQGLGYASGPHSSFIPYHVDAVTLQPFGDGWQDEMAMGRLIEGSFRSLNNLLEHLHQSFFFYLLMNKDRFVSIGTYLPSAMILAANFSIMSIFFWVKSGHKESGHGSEKSGSGPGSAGSTTVQRELFVPLLAVTISQFLGVFPLFLFNHLPANLLSVAFSAFAVLNCVLPSVLSYILKTAYQPTLQHYQLIKCFSLLLLGMFLSALATLNFSLAFFIGLLASPLTFMQPWPKNDLARYASSALLQLVSPTAVMLSATAFFGLDIGEVLRNAAFGWNVWGMYTPVVIWCVWWPAWIAGSVMVLGPTS

SEQ ID NO: 187 - DNA, 1908 bp, Zymoseptoria brevis
atggcgctcactgcgcgcctccttaccctccgccggtcacctattctactgaagctcccgccatacctctccctcctcttgatcgttgttggaatcgcatgggtactacttctcccattggacgaatactctcgccaaacatacatctccgagaacgcgatccttcctggacaagtccatacatactttggaggcagcgagcacaatgtctttcgagcgtatcgtcaagaggtgtacagcctgggccaacagccagggacggaaatcaggagagatggtttggtgaagatgatacgggagatgggtctgaagcctgcggtacagccattcagctaccatgtcgctggagagacgatatcaggggacaatgtgtacggacttttgcaagggcctcgagctgatgccacggaagcaatggtactcatggctgcatggcgcaacttcgacggcgaggtcaattattcgggagtggcattggcattggcaatggcgagatacttcaagcgctggagtatctggagcaaggatatcattctgctcatccccgaggacagcacgtacggaccggaagcttgggtttctgcgtaccacagcacatcagatacgataacctcgtcgaggaacgtcagtgccttgcctatcaaagctggagcgttgcaggcggcaatcgccttggactatcctgttgggccatggggcaaacggtttgggaaactggatgtactctacgacggcatcaacggcgctcttcccaatctcgatctcctgaacaccgcagcctctgtggccagcggtcagatgggaatgggctgcagtcttcacggcatgatagaccattcggacaagtacgaggatcgactgaagtgtcttgcaaaaggagccctgacgcaggccgctgggcatgccactggacctcattcagcattcatgccctatcatattgatgcgatcactctaaaaactgtcggagatggatggcacgacgaaatgggtcttggccgagtgaccgagagcgtgttccggtctatcaacaacttgcttgagcatctccaccaaagcttcttcttctacatcctgctgaacacgaatcgattcgccagtattgggagctaccttcccgctgccatgctcattgctggcagcttcacgatcaatgcgctcgccctatggattgcgagcggcaaaggtccggtcgagccacctggaaagccgacagcgagtctggaggagaaggtgaagaaggaagagacggtagcagttaagactggcgaaggcgtcgcgctcgttccgaaagctgagctggagagtgtcgagcgcaagatgtttgtgcctgccattgcattcttggctgtgcacctcctgagtgtggtacccctgcacgtgctaacacacacgccccgagcaagcttgtccttctccttctttgcaatcgcaggctcgacctacctgctcccgctctacttcagcacagtactcgtccggttcctgcgagcaagctcccagcaattgcagatcatgcagaccttctcgctgctcttcctcggcgcgacgctgtccacttgggctaccatcaatttctcgctcgcactcattgtgggcgtgctggcaacaccgcttggcttcgttcggcccctgccattcggaaaaggagacggacaaaacacaatagcacggttgggtctaagcatagctgttacagtgacctacttgatcgcttcgccacctacggcgatatatgccagcagctggtatttgaagaaagacgtttcgtggctgttgatggaggttgcaaaaggatgggtggcacaaggagtctggagccatttgatgatttggtccgtgtggtggcctgcttggatcttgggcggcatcgtcctatacagtggagcagtgcgcccgaagacatga

SEQ ID NO: 188 - protein, 635 aa, Zymoseptoria brevis
MALTARLLTLRRSPILLKLPPYLSLLLIVVGIAWVLLLPLDEYSRQTYISENAILPGQVHTYFGGSEHNVFRAYRQEVYSLGQQPGTEIRRDGLVKMIREMGLKPAVQPFSYHVAGETISGDNVYGLLQGPRADATEAMVLMAAWRNFDGEVNYSGVALALAMARYFKRWSIWSKDIILLIPEDSTYGPEAWVSAYHSTSDTITSSRNVSALPIKAGALQAAIALDYPVGPWGKRFGKLDVLYDGINGALPNLDLLNTAASVASGQMGMGCSLHGMIDHSDKYEDRLKCLAKGALTQAAGHATGPHSAFMPYHIDAITLKTVGDGWHDEMGLGRVTESVFRSINNLLEHLHQSFFFYILLNTNRFASIGSYLPAAMLIAGSFTINALALWIASGKGPVEPPGKPTASLEEKVKKEETVAVKTGEGVALVPKAELESVERKMFVPAIAFLAVHLLSVVPLHVLTHTPRASLSFSFFAIAGSTYLLPLYFSTVLVRFLRASSQQLQIMQTFSLLFLGATLSTWATINFSLALIVGVLATPLGFVRPLPFGKGDGQNTIARLGLSIAVTVTYLIASPPTAIYASSWYLKKDVSWLLMEVAKGWVAQGVWSHLMIWSVWWPAWILGGIVLYSGAVRPKT

SEQ ID NO: 189 - DNA, 1815 bp, Mycosphaerella graminicola; identical to SEQ ID NO: 153
  misc_feature: Zymoseptoria tritici (strain CBS 115943 / IPO323)

SEQ ID NO: 190 - protein, 539 aa, Mycosphaerella graminicola
MIREMGLKPAVQPFSYHVAGETISGNNVYGLLQGPRADATEAMVLMAAWRNFDGEVNYSGVALALAMARYFKRWSIWSKDIILLIPEDSTYGPEAWVSAYHSTSDTITSSRNVSALPIKAGALQAAIALDYPVGPWGKRFGKLDVLYDGINGALPNLDLLNTAASVASGQMGMGCSLHGMVDHSDKYEDRLKCLAKGALTQAAGHATGPHSAFMPYHIDAITLKTVGDGWHDEMGLGRVTESVFRSINNLLEHLHQSFFFYILLNTNRFASIGSYLPAAMLIAGSFTINALALWIASGKGPVEPPGKPTASLKEKVKQEETVAVQTGEGVALVPKAELESVERKMFVPAIAFLAVHLLSVVPLHVLTHTPRASLSFSFFAVAGSTYLLPLYFSTVLVRFLRASSQQLQIMQTFSLLFLGATLSTWATINFSLALIVGVLATPLGFVRPLPFGKGDGQTTIARLALSIAVTVAYLIASPPAAIYASSWYLKKDVSWLLMEVAKGWVAQGVWSHLMIWSVWWPAWILGGIVLYSGAVRPKT

SEQ ID NO: 191 - DNA, 1191 bp, Alternaria solani
atgaaattctccaccgctctcctgcctctcctggcagctccttttgccgccagcgaacatacatccaactgggctgtcctcgtctcgacatcacgcttctggttcaactaccgacatctcgccaatgtactctccttgtatcgcaccgtcaagcgtctcgggatccccgattcgcaaatcatcctcatgctgccggacgacatggcatgcaacccgcgtaacgccttccccggaaccgtgtacaacaacgcagaccgcgcgctagacctctacggtgacaacatcgaggtagactaccggggatacgaagtcacggttgagaacttcatccggttgatgacggacagagtgggagaggatatgccgcggagcaagaggctgatgacggacgagcggagtaacatcctcgtctacatgacgggccacggaggaaacgagtttctcaaattccaagacgcggaggagatcagcgcattcgatctcgcagatgcattcggacagatgtgggaaaagaaacggtatgttccattcccttcaatcacaaaccactctcctgcttgcccagaacaccctgctaatcaacaatcccagctaccacgaaatcctattcatgatagacacatgccaagccaacaccatgtactcgaaattctactccccaaacatcctcgcaaccggctcctcggaaattgaccaatcctcctactcgcaccacgccgacaacgacgtcggcgtcgcagtcatcgaccgctacacatactacaacctggagttcttggaaacccaggtccgcgatcccacctccaaactgacaatgggcgacctgttcgacagctacgacgaggagaagattcacagccacccaggtatacggtacgatctgttcgaaggaggggagcaggcggcgcgggagaggcgagttatggatttctttggcaatgtgcagaatgtggaaacagagggcaggaatgagacgggctggatacgagaggcgggaagtgtggtcaagatggcgaaatcgcatgaccaaagtgttgagaatgtcgtttctgaacggccctcacacagtgcacggaaagaaggtgcttggaaagtgggtgaggagcagggatggacaaggcaagcctacggagcggcggcgcttgcaggctgtgcaggcatctggcttgctggaagctggatcgagtccat

SEQ ID NO: 192 - protein, 373 aa, Alternaria solani
MKFSTALLPLLAAPFAASEHTSNWAVLVSTSRFWFNYRHLANVLSLYRTVKRLGIPDSQIILMLPDDMACNPRNAFPGTVYNNADRALDLYGDNIEVDYRGYEVTVENFIRLMTDRVGEDMPRSKRLMTDERSNILVYMTGHGGNEFLKFQDAEEISAFDLADAFGQMWEKKRYHEILFMIDTCQANTMYSKFYSPNILATGSSEIDQSSYSHHADNDVGVAVIDRYTYYNLEFLETQVRDPTSKLTMGDLFDSYDEEKIHSHPGIRYDLFEGGEQAARERRVMDFFGNVQNVETEGRNETGWIREAGSVVKMAKSHDQSVENVVSERPSHSARKEGAWKVGEEQGWTRQAYGAAALAGCAGIWLAGSWIESM

SEQ ID NO: 193 - DNA, 1170 bp, Blumeria graminis
  misc_feature: Blumeria graminis f. sp. tritici 96224
atgagaccgtcagaatggtccaggcttccagttctaacattgctgtgttttgtctcgacgatcgtcttagctgagcatactagcaattgggcagtcttagtatcgacatcccgattttggttcaattaccggcacatttccaatgtcctatccttgtatcgcaccgtcaagcgactgggtattcctgattctcaaattattcttatgctaccagacgatatggcatgtaatccacgaaacgctttcccgggaacagtatacagcaatgcagatcgagctgtagacctgtacggtgataatatcgaggtagactatcgaggatacgaagtcaccgtagagaattttatacgtcttctgactgatcgggttggcgaagaaatgccaagaagcaaaagattattaacagacgaccgaagcaatattctagtttacatgactgggcatggtggtaatgaatttttaaagttccaagacgcggaagaaattagtgcgtttgacttagcagatgcatttgaacaaatgtgggaaaagaaaaggtaccatgaactactcttcatgattgatacctgtcaagcaaatactatgtacagcaagctatattctccaaatataatagcaactggctcatccgaaattgatcaatcctcctactcgcatcacgccgataatgatgttggagtggccgttatcgatcgatatacgtattacaaccttgattttcttgagactcatgtaagggacccaggtagcaagaaaaccttggcagatttatttgatagttatgatgaatccaagatccactctcacccaggcgttcgatgggacctatttccaggaggggagcaacatggtcgagaaagattagtcatggatttttttgggaatgtacagaacgttgaagtcgatggtgcagtaaactttacagacaatagtgaagatttacttactttaggaaaaaaaatttcccaacttcagaagaaaagcgattcccaggtaaaacttgcgaatgagacggtccaagaaaaattacccgaagtaccgagtaatattaactctggagtatacaaggtagaagacgcaaggaattggtgggaaagaattacagtcggggcctgggctttgggtggtcttttaatggcatggtatgcggcatcacaacttgaggcttga

SEQ ID NO: 194 - protein, 389 aa, Blumeria graminis
MRPSEWSRLPVLTLLCFVSTIVLAEHTSNWAVLVSTSRFWFNYRHISNVLSLYRTVKRLGIPDSQIILMLPDDMACNPRNAFPGTVYSNADRAVDLYGDNIEVDYRGYEVTVENFIRLLTDRVGEEMPRSKRLLTDDRSNILVYMTGHGGNEFLKFQDAEEISAFDLADAFEQMWEKKRYHELLFMIDTCQANTMYSKLYSPNIIATGSSEIDQSSYSHHADNDVGVAVIDRYTYYNLDFLETHVRDPGSKKTLADLFDSYDESKIHSHPGVRWDLFPGGEQHGRERLVMDFFGNVQNVEVDGAVNFTDNSEDLLTLGKKISQLQKKSDSQVKLANETVQEKLPEVPSNINSGVYKVEDARNWWERITVGAWALGGLLMAWYAASQLEA

SEQ ID NO: 195 - DNA, 1137 bp, Bipolaris maydis
atgaagttgtccacgatacttctaccattgctggcggcgccctttgccgccagcgaacacacatccaactgggcggtcctagtatcgacctcacgcttctggttcaactaccgccatttggccaatgtcctgtctctctaccgcacagtaaagcgacttggaatccccgactcgcaaatcattctcatgctccccgatgacatggcgtgcaacccgcgcaacgccttccccggaaccgtgtataacaacgccgaccgcgcgctcgacctctacggcgacaacatcgaggtggactacagaggctatgaagtcacagtcgagaacttcattcgcctcatgacggaccgtgtgggcgaagatatgcctcgtagtaagcgactaatgacggacgagcgaagcaacatccttgtatacatgaccggccatgggggcaatgaattcctgaaattccaagacgcagaagaaatcagtgcctttgatctcgccgacgcctttggccagatgtgggagaagaaacgctaccatgaaatcctcttcatgatcgatacctgccaagcaaacaccatgtactcgaaattctactcccccaatatcctggccacaggctcctcagaaatcgaccagtcctcctactcgcaccacgccgacaacgacgtcggcgtcgcagtcatcgaccgctacacctactacaacctcgagttcctcgaaacaaaagtcaaagaccccaccagcaaactcacaatgggcgagctcttcgacagctacgatgaggagaaaattcacagtcgcccgggcattcgctacgatctttttgcgggcggcgagcaggaagccaggaacaggaaggttatggatttctttggcaatgtccagaatgtggaggttgagggcaggaacgagacgggttgggtaagcgaggcgggaagtggtcgtgcgaccaagctggctaaggcgcatgagcagagtgtggtggagaatgcgagttcgcagcagcaacccgtggtggagagcgtgcggagagaaggcgcgtggaaagtggataaggagcaagggtggaataagcaggcgtatggtgcggcggctttggttggctgtgcgggtatgtggcttgctggaagctggttggagtctttatag

SEQ ID NO: 196 - protein, 378 aa, Bipolaris maydis
MKLSTILLPLLAAPFAASEHTSNWAVLVSTSRFWFNYRHLANVLSLYRTVKRLGIPDSQIILMLPDDMACNPRNAFPGTVYNNADRALDLYGDNIEVDYRGYEVTVENFIRLMTDRVGEDMPRSKRLMTDERSNILVYMTGHGGNEFLKFQDAEEISAFDLADAFGQMWEKKRYHEILFMIDTCQANTMYSKFYSPNILATGSSEIDQSSYSHHADNDVGVAVIDRYTYYNLEFLETKVKDPTSKLTMGELFDSYDEEKIHSRPGIRYDLFAGGEQEARNRKVMDFFGNVQNVEVEGRNETGWVSEAGSGRATKLAKAHEQSVVENASSQQQPVVESVRREGAWKVDKEQGWNKQAYGAAALVGCAGMWLAGSWLESL

SEQ ID NO: 197 - DNA, 1137 bp, Bipolaris sorokiniana
atgaagttgtccacgatattcctgccattgctggcggcgccctttgccgccagcgaacacacatccaactgggcggtcctagtatcgacctcgcgcttctggttcaactaccgccacttggccaatgtcctgtctctctaccgcacagtaaagcgacttggaatccccgactcgcaaatcattctcatgctccccgatgacatggcgtgcaacccgcgcaacgccttccctggaaccgtgtataacaacgccgaccgcgcactcgatctctacggcgacaacatcgaggtggactacaggggctatgaagtcacagtcgagaactttattcgtcttatgacagatcgtgtgggagaggacatgccccgcagcaagcgattaatgacggacgagcgaagcaacatccttgtctacatgactggccacggcggcaacgaattcctgaaattccaagacgcagaagaaatcagcgcctttgatctcgccgacgcttttggccaaatgtgggagaagaaacgctaccacgaaatcctcttcatgatcgacacctgccaagcaaacaccatgtactcgaaattctactccccaaacatcctcgcgacgggctcctcggaaatcgaccaatcctcctactcgcaccacgccgacaacgacgtcggcgtcgcagtgatcgaccgctacacctactacaacctcgagttcctcgaaacaaaagtcaaagaccccaccagcaaactcacaatgggcgagctcttcgatagctacgatgaggagaaaattcacagtcgccccgggatacggtacgatctttttgcgggaggcgagcaggaagcgaggaataggaaggttatggatttttttggaaatgtgcagaatgttgaggttgagggcaggaatgagacgggttgggtaagagaggcgggaagtggtagtgcgaccaagctggctaaggcgcatgagcagagtgtggtggagaatgcgagtttgcagcagcaacccgtggtggagagtgtgcggagagaaggcgcgtggaaagttgatgaggagcaaggttggaataagcaggcgtatggcgcggcggctttggttggatgtgcgggtatatggcttgctggaagttggttggagtcattgtag

SEQ ID NO: 198 - protein, 378 aa, Bipolaris sorokiniana
MKLSTIFLPLLAAPFAASEHTSNWAVLVSTSRFWFNYRHLANVLSLYRTVKRLGIPDSQIILMLPDDMACNPRNAFPGTVYNNADRALDLYGDNIEVDYRGYEVTVENFIRLMTDRVGEDMPRSKRLMTDERSNILVYMTGHGGNEFLKFQDAEEISAFDLADAFGQMWEKKRYHEILFMIDTCQANTMYSKFYSPNILATGSSEIDQSSYSHHADNDVGVAVIDRYTYYNLEFLETKVKDPTSKLTMGELFDSYDEEKIHSRPGIRYDLFAGGEQEARNRKVMDFFGNVQNVEVEGRNETGWVREAGSGSATKLAKAHEQSVVENASLQQQPVVESVRREGAWKVDEEQGWNKQAYGAAALVGCAGIWLAGSWLESL

SEQ ID NO: 199 - DNA, 1134 bp, Bipolaris oryzae
atgaagttgtctacgatacttctaccattgctggcggcgccctttgccgccagcgaacacacttccaactgggcggtcctagtatcgacctcgcgcttctggttcaactaccgccacttggccaatgtcctgtctctctaccgtacagtaaagcgacttggaatccccgactcacaaattattctcatgctccccgatgacatggcatgcaacccgcgcaacgccttccccggaaccgtgtataacaacgcagaccgcgcgctcgatctctacggcgacaacatcgaggtggactacaggggctatgaagtcacagtcgagaatttcattcgcctcatgacagatcgtgttggcgaggacatgccccgcagcaagcgactaatgaccgacgagcgaagcaacatccttgtctacatgaccggccacggggggaatgaattccttaaattccaagatgcagaagaaatcagcgccttcgatctcgccgatgcctttggccagatgtgggagaagaaacgctaccacgagatcctcttcatgatcgacacctgccaggccaacaccatgtactcgaaattctactcccccaacatcctcgcaacgggctcctcagaaatcgaccaatcctcctactcgcaccacgccgacaacgacgtcggcgtcgcagtcatcgaccgctacacctactacaacctcgagttcctcgaaacaaaagtcaaagaccccaccagcaaactcacaatgggcgagctctttgacagctatgatgaggaaaagatccatagtcgccccgggattcggtatgatctttttgcgggtggcgagcaggaagcgaggaataggaaggttatggatttttttggaaatgtgcagaatgttgaagtggaaggcaggaatgagacgggttgggtaagggaggcgggaagcggtagtgcgaccaagctggctaaggcgcatgagcagagtgtggtggagaatgcaagtttgcagcagcccgtagtggagagtgtgcggagagaaggcgcgtggaaagtggatgaggagcaaggatggaataagcaggcgtatggcgcggcggctttggctggctgtgcgggtatatggcttgctggcagttggttggagtccttgtag

SEQ ID NO: 200 - protein, 377 aa, Bipolaris oryzae
MKLSTILLPLLAAPFAASEHTSNWAVLVSTSRFWFNYRHLANVLSLYRTVKRLGIPDSQIILMLPDDMACNPRNAFPGTVYNNADRALDLYGDNIEVDYRGYEVTVENFIRLMTDRVGEDMPRSKRLMTDERSNILVYMTGHGGNEFLKFQDAEEISAFDLADAFGQMWEKKRYHEILFMIDTCQANTMYSKFYSPNILATGSSEIDQSSYSHHADNDVGVAVIDRYTYYNLEFLETKVKDPTSKLTMGELFDSYDEEKIHSRPGIRYDLFAGGEQEARNRKVMDFFGNVQNVEVEGRNETGWVREAGSGSATKLAKAHEQSVVENASLQQPVVESVRREGAWKVDEEQGWNKQAYGAAALAGCAGIWLAGSWLESL

SEQ ID NO: 201 - DNA, 1140 bp, Bipolaris victoriae
  misc_feature: Bipolaris victoriae FI3
atgaaattttctgcgatactcctgccattgctggcggcgccctttgccgccagcgaacacacatccaactgggcggtcctggtatcgacctcacgcttctggttcaactaccgccacttagccaatgtcctgtctctttaccgcacagtaaagcgacttggaattcccgactcgcaaatcattctcatgctccccgatgatatggcgtgcaacccgcgtaacgccttccccggaaccgtatataacaacgccgaccgcgcgctcgatctctacggtgacaacatcgaggtggactacaggggctacgaagtcacagtcgagaacttcattcgcctcatgaccgatcgtgtgggcgaggatatgccccgcagcaagcgattaatgacggacgagcgaagcaacatccttgtctacatgacgggccacgggggcaacgaattcctaaaattccaagatgcagaagaaatcagcgcctttgatctcgccgatgctttcggccaaatgtgggagaagaaacgataccacgaaatcctcttcatgatcgacacctgccaagcaaacaccatgtactcgaaattctactcccccaacatcctcgcaacagggtcctctgaaattgaccaatcctcatactcgcaccacgccgacaacgacgtcggcgtcgcagtcatcgaccgctacacgtactacaacctcgagttcctcgaaacaaaagtaaaagaccccaccagcaaactcacaatgggcgagctcttcgacagctacgacgaggagaaaattcacagtcgcccaggcatccgatacgatctttttgcaggcggcgagcaggaagcgcggaataggaaggttatggatttctttgggaacgtccagaatgtagaggtcgagggaaggaatgagacggggtgggtacgcgagcccggaagtgcgagtgcgacgaagctggccaaggcgcatgagcagagcgtggtggagaatgcgagttcgcagcagcaacagcccgttgtggagagtatacggagggaaggcgcgtggaaagtggatgaggaacaagggtggaataagcaggcgtatggcgcggcggctttggttggctgtgcgggcatatggcttgctggaagctggttggagtctttgtag

SEQ ID NO: 202 - protein, 379 aa, Bipolaris victoriae
MKFSAILLPLLAAPFAASEHTSNWAVLVSTSRFWFNYRHLANVLSLYRTVKRLGIPDSQIILMLPDDMACNPRNAFPGTVYNNADRALDLYGDNIEVDYRGYEVTVENFIRLMTDRVGEDMPRSKRLMTDERSNILVYMTGHGGNEFLKFQDAEEISAFDLADAFGQMWEKKRYHEILFMIDTCQANTMYSKFYSPNILATGSSEIDQSSYSHHADNDVGVAVIDRYTYYNLEFLETKVKDPTSKLTMGELFDSYDEEKIHSRPGIRYDLFAGGEQEARNRKVMDFFGNVQNVEVEGRNETGWVREPGSASATKLAKAHEQSVVENASSQQQQPVVESIRREGAWKVDEEQGWNKQAYGAAALVGCAGIWLAGSWLESL

SEQ ID NO: 203 - DNA, 1140 bp, Bipolaris zeicola
  misc_feature: Bipolaris zeicola 26-R-13
atgaaattttctacgatactcctgccattgctggcggcgccctttgccgccagcgaacacacatccaactgggcggtcctggtatcgacctcacgcttctggttcaactaccgccacttagccaatgtcctgtctctttaccgcacagtaaagcgacttggaattcccgactcgcaaatcattctcatgctccccgatgacatggcgtgcaacccgcgcaacgcctttcccggaaccgtatataacaacgccgaccgtgcgctcgatctctacggcgacaacatcgaggtggactacaggggctacgaagtcacagtcgagaacttcattcgcctcatgaccgatcgtgtgggcgaagatatgccccgcagcaagcgattaatgacggacgagcgaagcaacatccttgtctacatgacgggccacgggggcaacgaattcctaaaattccaagatgcagaagaaatcagcgcctttgatctcgccgatgctttcggccaaatgtgggagaagaaacgataccacgaaatcctcttcatgatcgacacctgccaagcaaacaccatgtactcgaaattctactcccccaacatcctcgcaacagggtcctctgaaattgaccaatcctcatactcgcaccacgccgacaacgacgtcggcgtcgcagtcatcgaccgctacacgtactacaacctcgagttcctcgaaacaaaagtaaaagaccccaccagcaaactcacaatgggcgagctcttcgacagctacgacgaggagaaaattcacagtcgcccaggcatccgatacgatctttttgcgggcggcgagcaggaagcgcggaataggaaggttatggatttctttgggaacgtccagaatgtagaggtcgacggaaggaatgagacggggtgggtacgcgagcccggaagtgcgagtgcgacgaagctggccaaggcgcatgagcagagcgtggtggagaatgcgagttcgcagcagcaacaacccgttgtggagagtgtacggagggaaggcgcgtggaaagtggatgaggaacaagggtggaataagcaggcgtatggcgcggcggctttggttggctgtgcgggcatatggcttgctggaagctggttggagtccttgtag

SEQ ID NO: 204 - protein, 379 aa, Bipolaris zeicola
MKFSTILLPLLAAPFAASEHTSNWAVLVSTSRFWFNYRHLANVLSLYRTVKRLGIPDSQIILMLPDDMACNPRNAFPGTVYNNADRALDLYGDNIEVDYRGYEVTVENFIRLMTDRVGEDMPRSKRLMTDERSNILVYMTGHGGNEFLKFQDAEEISAFDLADAFGQMWEKKRYHEILFMIDTCQANTMYSKFYSPNILATGSSEIDQSSYSHHADNDVGVAVIDRYTYYNLEFLETKVKDPTSKLTMGELFDSYDEEKIHSRPGIRYDLFAGGEQEARNRKVMDFFGNVQNVEVDGRNETGWVREPGSASATKLAKAHEQSVVENASSQQQQPVVESVRREGAWKVDEEQGWNKQAYGAAALVGCAGIWLAGSWLESL

SEQ ID NO: 205 - DNA, 2658 bp, Botryosphaeria parva
atggaggggcacggcgcccgcctcgacgccgccgacaagacatggcatctcacctcgcccacgccctacgaccctcccctgacctacggcggatggacacagtcgcgcgccctcggtactcgtatagccagcctgctgcaagcccgcgaggaggctgacggcctgtcccccgcatctcacagcaggagcaacagtctggatgccggcctcgaccagcatgcctcggccagccccgatggccgtcgaagacgcaaacacaaggttgtcgtccacagttcgccctatctgcgctgcgtccagactgccgtcgccatcagcgccggtattgctcagtaccaggcctccccgcccgcctcgcggtcccgcagcatctccccgcgccgtcgtgcttccttgcactctacaaccctcaacggccgcggctccgagcgctcccccggtcccaaggccatccccgagcccgaggatgacccaacccgcaatgttttgagcaaggcgttcaaaaagaagggcattgaaaagacgacgttgcgcgttgacgctttcttgggcgagtggctttcacccgactactttgacctgatcaccccgcctcccaactccaccatgatggttgccagcgccaaggccgacctgctccgtcgcggcgagtacattgatgcccgccccaactcctcacaaggctctggtaatttccccggcggttggggttccgacagagccaccggtgccgcaaacaccttcaactccgccggagcttcgctgtccggtctgggcagcctagctcaggccctaccgttacgcgacagagccagcagtcaagggagtgcctcaagtgctgccagcagggcaagccgcaagcgtgatatagccattcccaccacgacaagatcggataccggtatttacagagcgcctgtgcctgcctacgccgtctcacccgcagagcccatcccccgaggctacgtcgcccacgctcgcgatgcctgcgtcgacgtcgattaccagtgggacagcatgcgcgagccacaggaatggggcgacggtggcgaatacggcgaggaatggagcgccatgcacaagcgttttcgacgtggcctgaccaacatgatttcgtggtacaaggaacacggtcctggtggccatcctgatgaggccattgttgattctgcagaggatgaggaagacgaggacctcgtcttggtccttgtcactcacgtcaagaaggagattccgaacaacaaggtcattgaacctgcgagtcgcacgccttctcccatgaatgaacgtcggagtgagcaggagaaggataaggagaatgaaaaggagcaggagcaggagaaggagatggagatggagcaggacactccggagaaggaagaggccgaagacaacattgctccactacctcccaacattggaagatcgatgagccagcacggactgtggggatcgcactcgattcccgatctcgacaccatgcgctcgttcgtcaccgcgccgctgctcgccggcgtgtggctcctggctgccctcggcgcggccgagcacacgtccaactgggccgtcctggtctcgacgtcgcgcttctggttcaactaccgccaccttgccaatgtgctctctgtctatcgcaccgtcaagcgtctcggcatccccgactcgcagatcatcctcatgctgccggacgacatggcctgcaatccgcgcaacgccttccccggcaccgtctacaacaatgccgaccgcgcgctggatctgtatggcgacaatatagaagtggattaccgcgggtatgaggtgacggtggagaacttcatccgcctcatgacggaccgcgtgggcgaggacatgccgcgcagcaagcgcctcttgaccgacgaccggagcaatatcctggtatacatgacgggccatggaggcaacgagtttctgaagttccaagatgccgaggaaattagcgcgtttgacctcgcagacgcctttgagcagatgtgggaaaagaaacgctaccacgagatgctcttcatgatcgacacctgccaggccaacaccatgtacagcaagttctactcgcccaacatcattgccaccggatcctcggagattgaccaatcgtcgtactcgcaccacgccgacaacgacgtcggcgtggccgtcatcgaccgctacacctactacaacctcgagttcctcgagacccaggtcaaggacccgtcgtcgaagctgacactgggcgaccttttcgacagctacgacgaggccaagatccacagccaccccggtgtcaggtacgacctgttccaaggcggagaacaagcggccagggaaaggctggtcatggatttctttggaaacgtccagaacgtggaggtcgagggcgtagggcgcaacgagtccaagctccaagaagagttggaatatctgagcagacttattgaggctgccaagcagaagcacaacgaaagcgagcccgtggcggcgtatggcgcaggtgtcaacaaggaggaggcgtccgttgagccagataatgcaaagaggttcgagggcgcagccaagattcaacgagacgatggctggggaaagcagctcatcggtctatcggcggtgataggcatggctggtgtgtgggcagctggatcttggctggagtcctag

SEQ ID NO: 206 - protein, 885 aa, Botryosphaeria parva
MEGHGARLDAADKTWHLTSPTPYDPPLTYGGWTQSRALGTRIASLLQAREEADGLSPASHSRSNSLDAGLDQHASASPDGRRRRKHKVVVHSSPYLRCVQTAVAISAGIAQYQASPPASRSRSISPRRRASLHSTTLNGRGSERSPGPKAIPEPEDDPTRNVLSKAFKKKGIEKTTLRVDAFLGEWLSPDYFDLITPPPNSTMMVASAKADLLRRGEYIDARPNSSQGSGNFPGGWGSDRATGAANTFNSAGASLSGLGSLAQALPLRDRASSQGSASSAASRASRKRDIAIPTTTRSDTGIYRAPVPAYAVSPAEPIPRGYVAHARDACVDVDYQWDSMREPQEWGDGGEYGEEWSAMHKRFRRGLTNMISWYKEHGPGGHPDEAIVDSAEDEEDEDLVLVLVTHVKKEIPNNKVIEPASRTPSPMNERRSEQEKDKENEKEQEQEKEMEMEQDTPEKEEAEDNIAPLPPNIGRSMSQHGLWGSHSIPDLDTMRSFVTAPLLAGVWLLAALGAAEHTSNWAVLVSTSRFWFNYRHLANVLSVYRTVKRLGIPDSQIILMLPDDMACNPRNAFPGTVYNNADRALDLYGDNIEVDYRGYEVTVENFIRLMTDRVGEDMPRSKRLLTDDRSNILVYMTGHGGNEFLKFQDAEEISAFDLADAFEQMWEKKRYHEMLFMIDTCQANTMYSKFYSPNIIATGSSEIDQSSYSHHADNDVGVAVIDRYTYYNLEFLETQVKDPSSKLTLGDLFDSYDEAKIHSHPGVRYDLFQGGEQAARERLVMDFFGNVQNVEVEGVGRNESKLQEELEYLSRLIEAAKQKHNESEPVAAYGAGVNKEEASVEPDNAKRFEGAAKIQRDDGWGKQLIGLSAVIGMAGVWAAGSWLES

SEQ ID NO: 207 - DNA, 1167 bp, Botrytis cinerea
atgaggttctccaacttcatccaacttcctctggtgcttgcgcctctattcgcacctttacttgcaaccgcagaacacacaagcaattgggcagtcctcgtatcgacttcgcgattctggttcaattatcgtcatttggcgaatgttctctctctctatcgcaccgtcaaacggctagggattccagattctcaaatcattcttatgctacccgacgatatggcatgcaatcctcggaatgcctttcctggcacagtctacagtaatgccgatcgcgccgtggacttatatggagacaatatcgaggtggactacagaggatacgaggttacagtagagaactttattcgactgctgacagatagagttggtgaagagatgccgagaagtaagaggcttttgacggacgatcgaagcaatatcttggtttatatgacaggtcatggtggtaacgagttcttaaaattccaagatgcagaagaaattagcgcatttgatttggcagatgcatttgagcagatgtgggagaaaaaaaggtatcatgaattactcttcatgatcgatacttgccaagcgaataccatgtacagcaaattctattctcccaacatcattgcgacgggctcttcggaaattgatcaatcatcatactcccatcatgcggataatgatgttggggtagcagtcattgatcgatatacatattacaacctagatttccttgaaactcaagttcgggaacctggaagcaagaagacactaggcgatttatttgatagttatgatgaatctaaaattcattcgcatcctggggttagatgggatctattcccaggcggagagcaaggaggtagggaaagactcctaatggatttcttcggcaatgtgcaaaacgtagaagttgacaagattgcaaacgacacggaatggaaagaagacctactttcactaggtaagaagattgctgagctgcgtgaacggactgaagcagcggaaaagaatgctacgtctgctgcatcactttcggaaaatcgcccgactcgcaaaatacgtgctgcgaaggtagaagtagataactcttggtggggcaagaaagctgtgggtgcatgggctttagcaggttgttcacttgtttggctcgcaggaacatacttagagtcggcatag

SEQ ID NO: 208 - protein, 388 aa, Botrytis cinerea
MRFSNFIQLPLVLAPLFAPLLATAEHTSNWAVLVSTSRFWFNYRHLANVLSLYRTVKRLGIPDSQIILMLPDDMACNPRNAFPGTVYSNADRAVDLYGDNIEVDYRGYEVTVENFIRLLTDRVGEEMPRSKRLLTDDRSNILVYMTGHGGNEFLKFQDAEEISAFDLADAFEQMWEKKRYHELLFMIDTCQANTMYSKFYSPNIIATGSSEIDQSSYSHHADNDVGVAVIDRYTYYNLDFLETQVREPGSKKTLGDLFDSYDESKIHSHPGVRWDLFPGGEQGGRERLLMDFFGNVQNVEVDKIANDTEWKEDLLSLGKKIAELRERTEAAEKNATSAASLSENRPTRKIRAAKVEVDNSWWGKKAVGAWALAGCSLVWLAGTYLESA

SEQ ID NO: 209 - DNA, 1203 bp, Cercospora beticola
atgcgcctcctcgagctccctacggcgctgctggcgctactcgccgccctcccagaagcatctgccactcacacctcgaactgggcagtgttagtgagcacatcccgcttctggttcaactaccgccatctcgcgaatacgctatctctatatcgtactgtgaaacgcctagggatacccgatagccagatcatcctcatgttacccgacgacatggcctgcaatccccgcaactcgtttcctggcagcgtcttcaacgacaagtcgcgacaactagacctatacgatgaccaaggttctcgcgacaataaggcaggaatgggaggaatagaggtggactacagagggaacgaggtcacagtggagaacttcattcggctgcttacagatcgctggccggcatcgcatcccacgagtaaacgactcatgaccgacgaccgctcgaatatcctcatctacatgactggacacggcgggaacgagtttctgaagtttcaagacagcgaggagatcagcagctttgatcttgcagacgcgttcgagcaaatgtgggagaagaagagataccatgaactgctcttcatgattgatacgtgtcaggcgaacacgatgtataccgctttctacacgccgaatataattgcgacagggagcagtgagaaagatcagagcagctacagtcatcatgcggatcaggatgtgggcgtggcagtaattgacaggtggacatattacaatttggagttcttggagacgcgattaaacagcacgagtgcggatgtgaggcttggagaacttttcgactactatacattcgatcgagtgcacagcgacgcgggtgtgagatacgacctatttcctggaggagaggaggctgtgagaaataaacgcatattggacttcttcggcagcgtgcaaggtgtagagacgagtggcatgaatgaagcgaaggcagatgattggaagagagacctggaagcactgcaaaagatcatggagagacaacgtgaggaagatctgaactacagcaagacggaacagggcagcgaggctactgtgcaggccgccgcggacaaagctcaagaaccggttgcgctcaacatggcgcaagctggtgaaggatgggccaagaaggccgtaggacttgcatctttgctgctggtgggtggtgcatggttggctgccaatgttctgacaaagagc

SEQ ID NO: 210 - protein, 401 aa, Cercospora beticola
MRLLELPTALLALLAALPEASATHTSNWAVLVSTSRFWFNYRHLANTLSLYRTVKRLGIPDSQIILMLPDDMACNPRNSFPGSVFNDKSRQLDLYDDQGSRDNKAGMGGIEVDYRGNEVTVENFIRLLTDRWPASHPTSKRLMTDDRSNILIYMTGHGGNEFLKFQDSEEISSFDLADAFEQMWEKKRYHELLFMIDTCQANTMYTAFYTPNIIATGSSEKDQSSYSHHADQDVGVAVIDRWTYYNLEFLETRLNSTSADVRLGELFDYYTFDRVHSDAGVRYDLFPGGEEAVRNKRILDFFGSVQGVETSGMNEAKADDWKRDLEALQKIMERQREEDLNYSKTEQGSEATVQAAADKAQEPVALNMAQAGEGWAKKAVGLASLLLVGGAWLAANVLTKS

SEQ ID NO: 211 - DNA, 3252 bp, Claviceps purpurea
atgttgccgcagaggtttccatcacacatgggcctcgccttggccctggccctggccgtcttcgcatcattagtcgcaagcgagcacacgagcaactgggctgtgctggtctgcacgtcgcgcttctggttcaactatcgccacctggccaacgtgctctccatctaccgaaccgtgaagcgactcggcatcccggattcgcaaattatcctcatgctccccgacgacatggcctgtaatccgcgcaacgccttccctggcacggtctacagcaactccgatcgcgccgttgatctctacggcgacaacatcgaggtcgactatcgcgggtacgaggtcaccgtcgagaacttcatccgactgttaacggacagggtgggcgacgagatgcctcgcagtaaacggctgctgacggatgagcggagcaatattctggtgtacatgacggggcatggggggaatgagtttttaaagttccaggatgcggaggagattggctcgtttgatcttgccgatgctttccagcagatgtgggagaagaagagatatcacgaaatcctcttcatgattgacacttgccaagcgaacaccatgtacagcaggctctactcgcccaacatcattgcgacaggatcatccgagctcgaccagtcttcatattcccaccacgccgataacgatgtcggcgtggccgtgatcgaccgatacacatactacaacctggagtttctggagaaccaggtcaaggatctaaccagtcgcaagacggtcggtgagctcttcgacagctacgactacgaaaagattcactcccacgccggcgtgcgctacgacctatttcccggtggcgccgagggggcccgaagccgtctgattactgattttttcggcaacatccaaaacgtcgaagtggaccgggatgccagttctgcgctcgatgagcaattgctgtcgttgagcaagaccattacgctgctccggcagaaagaggcggaggaaggtgctgcgcgtcgcaagaacgcgacgatgtcagcgcctgcgagggtctcggatggggatgcggcagtggtgaccaagattcaaagcgccacggtcctgactgacgatgactggtggacgaagaaggttgttggcgcgactgcgctggcgcggccattgcaccctctggagcttcgcgcgcgccccatcgcgcctcgggccatagcatggtcctgcgacgcagaattggccatcgctacaacggacacaatacatatctttctgcccgagtatccgcggcccagccgcagctccgacgacgcccctgatgaagatgccttccggcctcagttctcactcacgctcaccgcgagcggcatcctccgtcccgaccctgccatcaacggtcctctgtgcgcttttgccggcgtgatcttacctcacgccgagtccaacgagagcttcgtttttcgtggagtaggaaccggcgaggctacccgttgcggctcctctctgagccagagcctcggcgtggaatggtccccgaatgggctgggccggaatctgcgccccgtgctgactatcttgaccacgtcggggagcatcgtcgccatgggggagcacatagacggccatggctcgcggcctgtcatgacatcgacgctacgatcccgcacgttcaaaaactggaagattctctggggcttgggcgcccagttgcccatcccggacgaggagagcgccggtgggttccgcaacatggatgagcggattgtgtcgatgtcgtgggcgggagaggttggctcggggacggggctgctggcatatatgaatgatgagcgggaggtggttatcatgggggtgcagcttttgcatcgggtggttggggagggtgaggagtcgggatgggatgtctctgagattgttcgatttgattgccggggtccgcatcatggcgagcagacaaccaacgttggagacgccgactttatccccagcagcggcgcgtattgtctcaaatggagtccctggtccgtcaaccaggactcccgcacggcaaccattgcatacgtggcgaaaaattacgtcgggttccggagagtgactattcagggggcctggctgcgagggcaagacccgattatccagatagatgcggccgatgccttgggtatctgcacgtttctttctgcagatgcgtttgtggaatgggagaatcatatctggcaagaggacgattcacgactggcgcgaggcatcatcgcaacgccctttgtagtcaagccctttcaagtcgatctctgcgcggatccaagcccacctacggcgtcgcattccccagacgactacctcattatccatcatccaaacccatctcagaaatctctcgaacccctctactccctcatccgcctctccgccacccctaccaaccaagactggtaccaaaccaatctaccctcggaggagaagctcccccagtgggcccaacgcgtccaccgcgccatctcccggcaggtatcacgcgtagaagccctcggtggaatcgactccgaatccgatacagattctgaattcgacgagccagaagtcgacatgtccatgatgcccgaggaggaaacctccaccttctccaaggttcatccgcatcgcttccgcctctggggcatggccgcctctcctggggatggatgcattgcgacactcgtatccaagcacgtcacacagtatgcggaccggcggccccgggccagaattctcttctcgtggccgacacaggaggatctagcagcagcagcagcagcagaaacggcggaagcggcaccagcgacgacggcattatccgtctcagaaatatcgtcattcacgtccctgacaacagagggaatggtctgggaatccatgcacggcaacattcgcgaggtcccaagctggctgtccagaacggcggagagctgtttctggcgagacacgcccttgagaaggcagttcatggctgtgattcccaagcaaacatgtgtcttttgcgatgcgagacttgtcgcgtttggtaatgaatcgatctgtgagagaggtcactcctttgcaacctgcgccgccaccggtctagctatcctcgcaccgggcatctcacgaatctgttccgtctgcgacctccgctgcctaaacatatccgagttgtcccggatcgctgctcagcacatcagtccagaggccgtggtagaatccctgggggaagcatgcggcgggtgtggaggtaaattcttactctga

SEQ ID NO: 212 - protein, 1083 aa, Claviceps purpurea
MLPQRFPSHMGLALALALAVFASLVASEHTSNWAVLVCTSRFWFNYRHLANVLSIYRTVKRLGIPDSQIILMLPDDMACNPRNAFPGTVYSNSDRAVDLYGDNIEVDYRGYEVTVENFIRLLTDRVGDEMPRSKRLLTDERSNILVYMTGHGGNEFLKFQDAEEIGSFDLADAFQQMWEKKRYHEILFMIDTCQANTMYSRLYSPNIIATGSSELDQSSYSHHADNDVGVAVIDRYTYYNLEFLENQVKDLTSRKTVGELFDSYDYEKIHSHAGVRYDLFPGGAEGARSRLITDFFGNIQNVEVDRDASSALDEQLLSLSKTITLLRQKEAEEGAARRKNATMSAPARVSDGDAAVVTKIQSATVLTDDDWWTKKVVGATALARPLHPLELRARPIAPRAIAWSCDAELAIATTDTIHIFLPEYPRPSRSSDDAPDEDAFRPQFSLTLTASGILRPDPAINGPLCAFAGVILPHAESNESFVFRGVGTGEATRCGSSLSQSLGVEWSPNGLGRNLRPVLTILTTSGSIVAMGEHIDGHGSRPVMTSTLRSRTFKNWKILWGLGAQLPIPDEESAGGFRNMDERIVSMSWAGEVGSGTGLLAYMNDEREVVIMGVQLLHRVVGEGEESGWDVSEIVRFDCRGPHHGEQTTNVGDADFIPSSGAYCLKWSPWSVNQDSRTATIAYVAKNYVGFRRVTIQGAWLRGQDPIIQIDAADALGICTFLSADAFVEWENHIWQEDDSRLARGIIATPFVVKPFQVDLCADPSPPTASHSPDDYLIIHHPNPSQKSLEPLYSLIRLSATPTNQDWYQTNLPSEEKLPQWAQRVHRAISRQVSRVEALGGIDSESDTDSEFDEPEVDMSMMPEEETSTFSKVHPHRFRLWGMAASPGDGCIATLVSKHVTQYADRRPRARILFSWPTQEDLAAAAAAETAEAAPATTALSVSEISSFTSLTTEGMVWESMHGNIREVPSWLSRTAESCFWRDTPLRRQFMAVIPKQTCVFCDARLVAFGNESICERGHSFATCAATGLAILAPGISRICSVCDLRCLNISELSRIAAQHISPEAVVESLGEACGGCGGKFLL

SEQ ID NO: 213 - DNA, 1248 bp, Colletotrichum gloeosporioides
atgaagctctcacgcctcctgcaattgccagtcctgctggcggcctcgacgctcgccccggccgtcctcgccgagcacaccagcaactgggccgtcctcgtctgcacctcgcgcttctggttcaactaccgccacctcgccaacgtcctctccatctaccgcacagtcaagcgtctcggcatccccgactcgcagatcatcctcatgcttcccgacgacatggcctgcaacccgcgtaacgccttcccgggcaccgtctacagcaactcggaccgcgccgtcgacctgtacggcgacaacatcgaggtcgactaccgcggctacgaggtcaccgtcgagaacttcatccgcctgctgaccgaccgcgtcggcgacgagatgccgcgcagcaagcgcctgctgacggacgatcggagcaacatcctggtatacatgacgggccacggcggcaacgagtttttgaagttccaggacgctgaggagattggcgcgttcgacttggcggatgcgtttgagcagatgtgggagaagaagagataccacgaaatcctcttcatgatcgacacatgccaggccaacacaatgtacagcaagctctactcccccaacatcatcgccaccggctcctccgaactcgaccagtcctcctactcccaccacgctgacaacgacgtcggcgtcgccgtcatcgaccgctacacctactacaacctcgagttcctcgagtcgcaggtccaggacctcagctccaagaagacggtcggcgagctgttcgacagctacacctacgagaagatccactccaacgccggcgtgcgctacgacctgttccccggcggcgccgacgccgcgcgcagccgccgcatcacagacttcttcggcaacgtgcagaacgtcgaggtcgacggcgcgaagaacatggtgctggacgaggagctgctggagctcagccagaagattgccgcgctgaagaagagggccgaggaggcggacgccgcggcgaggaacgcgacgctggcggagaaggctgcgcgcggcaggaaggcgaaggcgcaggcgaagagggtgcagatggcgaagccgctgacgaatgacaactggtgggagaagaagctggtcggtgctacggcattgcttggatgcgcgctgctttgggctctcgggtcgttcctggaagcaccgaagaaatcggatgatgaggccgagaagacgagcggccagaacggccatgcagcggtcaaggcataa

SEQ ID NO: 214 - protein, 415 aa, Colletotrichum gloeosporioides
MKLSRLLQLPVLLAASTLAPAVLAEHTSNWAVLVCTSRFWFNYRHLANVLSIYRTVKRLGIPDSQIILMLPDDMACNPRNAFPGTVYSNSDRAVDLYGDNIEVDYRGYEVTVENFIRLLTDRVGDEMPRSKRLLTDDRSNILVYMTGHGGNEFLKFQDAEEIGAFDLADAFEQMWEKKRYHEILFMIDTCQANTMYSKLYSPNIIATGSSELDQSSYSHHADNDVGVAVIDRYTYYNLEFLESQVQDLSSKKTVGELFDSYTYEKIHSNAGVRYDLFPGGADAARSRRITDFFGNVQNVEVDGAKNMVLDEELLELSQKIAALKKRAEEADAAARNATLAEKAARGRKAKAQAKRVQMAKPLTNDNWWEKKLVGATALLGCALLWALGSFLEAPKKSDDEAEKTSGQNGHAAVKA

SEQ ID NO: 215 - DNA, 1248 bp, Colletotrichum graminicola
  misc_feature: Colletotrichum graminicola M1.001
atgaagctctcacgcctcctgcaactgcctgtgatgctcgccgccgcaacgctcgccccggtggtgctggccgaacacacgagcaactgggccgtcctcgtctgcacatcccggttttggttcaactaccgccacctagccaatgtgctctccatctatcgcaccgtcaaacgactcggtatccccgactcgcagatcatcctcatgcttcccgacgacatggcctgtaacccgcgaaacgccttccccggcaccgtctacagcaactcggatcgcgcggtcgacctgtacggcgacaacatcgaggtagactaccgcggttacgaagtcactgtcgaaaactttatccggctcctgaccgaccgcgtcggcgacgaaatgcctcgcagcaagcgcctcctcaccgacgaccgaagcaacatcctcgtgtacatgacgggtcacggcggaaacgagttcctgaagttccaagacgccgaggagatcggcgcttttgaccttgccgatgcgttcgagcagatgtgggagaagaagagataccacgagatcctcttcatgatcgacacctgccaagcgaacacgatgtacagcaaactctactcccccaacattatcgccaccgggtcttcggagctcgaccaatcctcctactcacaccacgctgacaacgacgtcggcgtcgccgtcatcgaccggtacacatactacaacctcgagttcctcgaatcccaagtccaggatctgagctccaagaagacggtaggcgagctttttgacagctacacctacgagaagatccactcccacgccggcgtacgctacgacctgttccccggcggcgccgacgccgcacgtagccgtcgcatcaccgacttctttggcaacgtgcagaatgtcgaggtggacggggccaagaacatggccctcgacgaagagttgctggagttgagccagaagatttctgcgctgaagcggcgggccgaggaggccgacgccgcggcgaagaatgcttcgctggcggacaaggccaaggttcagacaccgagcgcccaggtccaggccaagcgtgtgaagatggccaagcctctcacgaatgacaactggtgggagaagaagattgttggcgccaccgctttggccggatgcgcccttctgtgggccttagggtcgtaccttgagacgccgaaggcggaggaggagactaagacgacgaccggccagaatgaccatatcactgtcaaggcatag

SEQ ID NO: 216 - protein, 415 aa, Colletotrichum graminicola
MKLSRLLQLPVMLAAATLAPVVLAEHTSNWAVLVCTSRFWFNYRHLANVLSIYRTVKRLGIPDSQIILMLPDDMACNPRNAFPGTVYSNSDRAVDLYGDNIEVDYRGYEVTVENFIRLLTDRVGDEMPRSKRLLTDDRSNILVYMTGHGGNEFLKFQDAEEIGAFDLADAFEQMWEKKRYHEILFMIDTCQANTMYSKLYSPNIIATGSSELDQSSYSHHADNDVGVAVIDRYTYYNLEFLESQVQDLSSKKTVGELFDSYTYEKIHSHAGVRYDLFPGGADAARSRRITDFFGNVQNVEVDGAKNMALDEELLELSQKISALKRRAEEADAAAKNASLADKAKVQTPSAQVQAKRVKMAKPLTNDNWWEKKIVGATALAGCALLWALGSYLETPKAEEETKTTTGQNDHITVKA

SEQ ID NO: 217 - DNA, 1251 bp, Colletotrichum higginsianum
atgaagctctcacgcctcctgcaactgccggccttcctagccgctgcgacgctggccccggcagtgttggccgaacacacgagcaactgggccgtccttgtctgcacgtcgcgattctggttcaactaccgccacctggccaatgtgctctccatctaccgtaccgtcaagcgcctcggcatccccgactcgcagatcatcctcatgctgcccgacgacatggcctgcaacccgcgcaacgcgttccccggaacagtttacagcaactcggaccgcgccgtcgacctgtacggcgacaacatcgaggtggactaccgcggctacgaggtcaccgtcgagaacttcatccgcctcttgaccgaccgcgtcggcgacgagatgcctcgcagcaagcgcctcctaaccgacgaccgaagcaacattctcgtatacatgaccggccacggtggtaacgaattcctcaagttccaggacgccgaggagattggcgcgtttgatcttgccgatgcgttcgagcagatgtgggagaagaagagataccacgagatcctcttcatgatcgacacctgccaggccaacaccatgtacagcaagctctactcccccaacatcatcgcgaccggctcctcggagctcgaccagtcgtcttactcccaccacgccgacaacgacgtcggcgtcgccgtcatcgaccggtacacgtactacaacctcgagttcctcgagtcgcaagtccaggacctgagctccaagaagacggtcggcgagcttttcgacagctatacgtacgagaagatccactcccacgcgggcgtgcgctacgacctgttccctggcggcgccgacgctgcacgcagccgtcgcatcacggacttcttcggcaacgtgcagaacgtcgaggtcgacggggccaagaacatggccctcgacgaagagttgctggagctgagccagaagatcgccgcgctgaagcggcgggtcgaggaggccgacgccgcggcgaagaacgcttcgctggccgacaaggacactgcccaggcgcccaacgtaaaggcccaggccaagagggtgaagatggccaagcccttgacaaatgacaactggtgggagaagaagatcgttggcgccaccgctttagtcggatgcgcccttttgtggatcctggggtcgtatctcgaggccccgaagcaggcggaagacgagaggaagaagacggctggtcaaaacggtcacgccgcagtgaaggcttga

SEQ ID NO: 218 - protein, 416 aa, Colletotrichum higginsianum
MKLSRLLQLPAFLAAATLAPAVLAEHTSNWAVLVCTSRFWFNYRHLANVLSIYRTVKRLGIPDSQIILMLPDDMACNPRNAFPGTVYSNSDRAVDLYGDNIEVDYRGYEVTVENFIRLLTDRVGDEMPRSKRLLTDDRSNILVYMTGHGGNEFLKFQDAEEIGAFDLADAFEQMWEKKRYHEILFMIDTCQANTMYSKLYSPNIIATGSSELDQSSYSHHADNDVGVAVIDRYTYYNLEFLESQVQDLSSKKTVGELFDSYTYEKIHSHAGVRYDLFPGGADAARSRRITDFFGNVQNVEVDGAKNMALDEELLELSQKIAALKRRVEEADAAAKNASLADKDTAQAPNVKAQAKRVKMAKPLTNDNWWEKKIVGATALVGCALLWILGSYLEAPKQAEDERKKTAGQNGHAAVKA

SEQ ID NO: 219 - DNA, 1992 bp, Colletotrichum orbiculare
atggccgtccatgacgtctctggcgtcccagaggacctcaaagcccgcgtcaaggagtcatacgacaccatggccccggtctacaatacctggaccgtccagcagtccagcctccgcctcgactacctcgagaagctcatggagaagctcctttccgcgaaaccgctcgcggggcagaagttgctcgccctcgagctcggctgcggctgcggtctgcccgtcacggacagactgctggcgacgcccgacgtcttcgtcacggccaacgatctgtcgagcgcccagatccagctggccagggagaaccttgccaagcacggcgccgactgcgtgtcctttgtcgagggcgacatgatggccctcgagttcgccgaaaactcgttcgacgccgtgttggccatgtacagcgtcatccacctgccccgcgaggagcagagcgagatgatccgccgcatcgcgaggtggctgaagcctggcgggttcctgctggccaacttttccaccgaggagatgcccggtcacgtcaacgaccagtggctgcacgaaaagggttggatgtactggagcggttggggcaccgaggcgacggtgaagaaaattgaggacactgggctagagttggtggtcaaggacgatgtcaaggacgagacggacgacacgatgcagctccgtggcgttcccccttaccaagcggcagcgcgacatcttcaggtcgacgtcgtcccgtcccttcggaccatcgtcgacatgaagttctcccgcatccttcaactaccagtcctcctggctgctgcgacgctggccccggcggtgctcgccgagcacacgagcaactgggccgtcctcgtctgcacgtcgcgattctggttcaactaccgccacctcgccaatgtcctgtccatctaccgcaccgtcaagcgactcggaattcccgattcccagatcatccttatgcttcccgacgacatggcctgcaacccacgaaacgctttccctggcaccgtctacagcaattccgatcgcgccgtcgatctgtacggcgacaacatcgaagtagactaccgcggttacgaggttaccgtcgaaaactttattcggctgttgactgaccgcgtcggagacgagatgccgcgcagcaagcgcctgctgacggacgaccggagcaatattctagtgtacatgactggccacggcggaaacgaatttctcaaattccaggatgccgaagaaattggcgctttcgacttggcagacgcttttgagcagatgtgggagaagaagagataccacgaaatcctcttcatgatcgacacctgccaagcgaacaccatgtacagcaagctctactcccccaacatcattgccaccggctcctccgaacttgaccaatcctcctactcacaccacgccgacaacgacgtcggcgtcgccgtcattgaccggtacacctactacaacctcgagttcctcgaatcgcaggtccaggacttgagctccaaaaagaccgtcggcgagctcttcgacagctacacctacgaaaagattcactccaacgccggcgtgcgctacgatctcttccccggcggcgccgacgctgcgcgcagccgtcgcatcaccgacttcttcggaaacgtgcagaacgtggaggtggacggtgcgaagagcatggtgctcgacgaagagttactcgagcttagccagaagattgcggcgctgaagaggagggctgatgaggctgacactgcggcgaagaacgcgacgctagcagagaaggccagagacgaggcgctcaaggtcaaggggcaggcgaagcgggtgcagatggccaagccgctgacgaacgagaattggtgggaaaagaagttcgtcggtgcctcggcgctgctcggctgtgcgctgctatgggctctggggtcatacctcgaagctccgaaggttgagcagacgaaaaaggccaatggtcaaaacgggcatgcgaagattaaagcttga

SEQ ID NO: 220 - protein, 663 aa, Colletotrichum orbiculare
MAVHDVSGVPEDLKARVKESYDTMAPVYNTWTVQQSSLRLDYLEKLMEKLLSAKPLAGQKLLALELGCGCGLPVTDRLLATPDVFVTANDLSSAQIQLARENLAKHGADCVSFVEGDMMALEFAENSFDAVLAMYSVIHLPREEQSEMIRRIARWLKPGGFLLANFSTEEMPGHVNDQWLHEKGWMYWSGWGTEATVKKIEDTGLELVVKDDVKDETDDTMQLRGVPPYQAAARHLQVDVVPSLRTIVDMKFSRILQLPVLLAAATLAPAVLAEHTSNWAVLVCTSRFWFNYRHLANVLSIYRTVKRLGIPDSQIILMLPDDMACNPRNAFPGTVYSNSDRAVDLYGDNIEVDYRGYEVTVENFIRLLTDRVGDEMPRSKRLLTDDRSNILVYMTGHGGNEFLKFQDAEEIGAFDLADAFEQMWEKKRYHEILFMIDTCQANTMYSKLYSPNIIATGSSELDQSSYSHHADNDVGVAVIDRYTYYNLEFLESQVQDLSSKKTVGELFDSYTYEKIHSNAGVRYDLFPGGADAARSRRITDFFGNVQNVEVDGAKSMVLDEELLELSQKIAALKRRADEADTAAKNATLAEKARDEALKVKGQAKRVQMAKPLTNENWWEKKFVGASALLGCALLWALGSYLEAPKVEQTKKANGQNGHAKIKA

SEQ ID NO: 221 - DNA, 1251 bp, Colletotrichum sublineolum
atgaagctttcgcgcctattacaacttcctgtgatcctggccgctgcgacgctcgccccggcggtgctggccgagcacacgagcaactgggccgtcctcgtctgcacatcccggttttggttcaactaccgacacctagccaatgtgctctccatctaccgtaccgtcaaacgcctcggcatccccgactcgcagatcatcctcatgctgcccgacgacatggcctgtaacccgcgaaacgccttccccggcaccgtctacagcaactcggatcgtgcggtcgacctgtacggcgacaacatcgaggtggactaccgcggctacgaagtcaccgtcgaaaactttatccgactcctgaccgaccgtgtcggcgacgaaatgcctcgcagcaagcgcctcctgaccgacgaccgaagcaacatcctcgtctacatgacgggccacggtggaaatgagttcctgaagttccaggacgccgaggagattggcgcttttgatcttgccgatgcgttcgagcagatgtgggagaagaagagataccacgagattctcttcatgatcgacacatgccaggcgaacacgatgtacagcaagctctactcccctaacatcatcgccaccggctcctcggagctcgaccaatcatcctactcccaccacgctgacaacgatgtcggcgttgctgtcatcgaccggtacacatactacaacctcgagttcctcgagtcgcaagtccaggatctgagttccaagaagacggtcggcgagctctttgacagctacacctacgagaagatccactctcacgccggcgtacgctacgatctgttccccggcggcgccgacgccgcgcgcagccgtcgcatcaccgatttctttggcaacgtgcagaatgtcgaggtggacggggccaagaacatggtcctcgacgaggagttgctggagctgagccagaagatttctgcgctgaggcggcgggccgaggaggccgacgtcgcggcgaagaatgcttcgctggcggacaaggccaaggttcagacgccgaacgcgaattcccaggccaagagggtgaagatggctaagcctctcacgaacgacaactggtgggaaaagaagattgttggcgccaccgctttagctgggtgcgcccttctgtgggtcttggggtcgtacatcgagactccgaagaaggcggaagaggagaccaagacgactaccggccagaatggccatgcaccagtcaaggcgtag

SEQ ID NO: 222 - protein, 416 aa, Colletotrichum sublineolum
MKLSRLLQLPVILAAATLAPAVLAEHTSNWAVLVCTSRFWFNYRHLANVLSIYRTVKRLGIPDSQIILMLPDDMACNPRNAFPGTVYSNSDRAVDLYGDNIEVDYRGYEVTVENFIRLLTDRVGDEMPRSKRLLTDDRSNILVYMTGHGGNEFLKFQDAEEIGAFDLADAFEQMWEKKRYHEILFMIDTCQANTMYSKLYSPNIIATGSSELDQSSYSHHADNDVGVAVIDRYTYYNLEFLESQVQDLSSKKTVGELFDSYTYEKIHSHAGVRYDLFPGGADAARSRRITDFFGNVQNVEVDGAKNMVLDEELLELSQKISALRRRAEEADVAAKNASLADKAKVQTPNANSQAKRVKMAKPLTNDNWWEKKIVGATALAGCALLWVLGSYIETPKKAEEETKTTTGQNGHAPVKA

SEQ ID NO: 223 - DNA, 1179 bp, Diplodia seriata
atgcgatctctcggtgccgcgcaggtctttgttgtactgtgcctcctggctgcgctcagcggggcggaacacacatccaactgggctgtcctggtctcgacgtcgcgcttctggttcaactaccgccacctcgccaatgtactctctctctaccgtactgtcaagcgcctcggaatccccgactctcaaatcatcctcatgctccccgatgacatggcctgcaatccgcgcaacgccttccctggcacagtctacaacaacgcagaccgcgcgctggatctgtacggtgacaacatagaggtcgactaccgcggatacgaggtaactgtggagaatttcatccgcctcatgacggaccgtgttggtgaggacatgccgcgcagcaagcgcctcttgaccgacgaccgaagcaatatcctcgtctacatgacaggccatggtggcaatgagtttctgaagttccaagacgctgaggagataagcgcgttcgatctcgcagacgcctttgagcagatgtgggagaagaagcgctaccatgagatgcttttcatgatcgacacgtgccaggccaacaccatgtacagcaagttctactcgcctaacatcatcgctaccggttcgtccgagatcgaccagtcgtcttattcgcaccacgcagacaacgatgttggcgtggccgtcatcgaccgctacacctactacaaccttgagttcctcgagacccaagttaaggatccgtcatctaaattgacccttggcgaccttttcgacagctacgatgagaccaaaatccatagccaccctggtttcagatacgatctcttccacggcggggagaaggcagctcgggacaggctggtcatggatttttttgggaatgtacagaatgtggaagtcgaaggcgtgggacgcaacgaatcgaagcttgaggaagagctggagtatctgagtaggttgatcgagactgcaaagcaaaaggccaacgaaaccgaggtggcggcggcgtacggtgcaagcgtcgacaagaacgaggcagccgtacagccgaagactaagaagaagttcgaaggggcagcaaaggttcagcgagatgatggatggagcaagcagatcatcggactctctgctgtgatgggctttgccggcgtttgggctgccggatcatggctggagtcttga

SEQ ID NO: 224 - protein, 392 aa, Diplodia seriata
MRSLGAAQVFVVLCLLAALSGAEHTSNWAVLVSTSRFWFNYRHLANVLSLYRTVKRLGIPDSQIILMLPDDMACNPRNAFPGTVYNNADRALDLYGDNIEVDYRGYEVTVENFIRLMTDRVGEDMPRSKRLLTDDRSNILVYMTGHGGNEFLKFQDAEEISAFDLADAFEQMWEKKRYHEMLFMIDTCQANTMYSKFYSPNIIATGSSEIDQSSYSHHADNDVGVAVIDRYTYYNLEFLETQVKDPSSKLTLGDLFDSYDETKIHSHPGFRYDLFHGGEKAARDRLVMDFFGNVQNVEVEGVGRNESKLEEELEYLSRLIETAKQKANETEVAAAYGASVDKNEAAVQPKTKKKFEGAAKVQRDDGWSKQIIGLSAVMGFAGVWAAGSWLES

SEQ ID NO: 225 - DNA, 1176 bp, Fusarium fujikuroi
atgaacctctcaatacttcgatttcatgccatcgtggcagcggccatgttcacgacaatcgctttcggcgagcataccagcaactgggccgttctcgtctgcacatcacgattctggttcaactaccgccatctcgccaatgtcctctctatgtaccgtaccgtcaagcgcctgggtatccctgactcccagatcatcctcatgcttcccgacgacatggcctgcaatccccggaacgcgttccctggaaccgtctacagcaattctgaccgcgctgttgatctctacggcgacaacatcgaggtggactaccgtggctacgaagttactgtcgagaactttattcgcctgttgacggatcgcgtgggcgcggagatgccgcgaagcaagcgtctccttaccgatgatcgaagcaacatcttggtttatatgactggccatggtggaaacgagttcctcaagttccaggatgctgaagagattggcgcatttgatcttgccaacgcttttgaggagatgtgggagaagaagagatatcacgagatcctcttcatgatcgacacctgccaagcgaacaccatgtacagcagactttactcccctaacatcatcgctaccggttcctccaagctcgatcagtcctcatactcgcatcacgccgacaacgatgtaggcgtcgccgttatcgatcgatacacgtactacaatcttgaattccttgagaataacgtcaaggacctgaacagccagaagacagtgggcgaactgttcgacagctacgacttcggcaagatccactcacatgctggagtgcgctacgacctcttccctggcggcgaagaaaacgcccgtagccgtctgatcacagacttcttcggcaacatccaaaacgttgaggttgaccgcagcggcaacttgactctcgaggaggatctcctggcgctcagcaagaaaattgcccttctgcagcagaaggaagcagaggcagccaaggagtctgttggggagaaggtatctgcaaaggcacctgctagtgctccaactgaggcagccaggaagatccaaaaagccaaggcattgacggatggcaactggtggacaaagaaggtcgttggtgcaacagcgcttgcaggttgtggccttctctggggtttaggatctttcttagagggttga

SEQ ID NO: 226 - protein, 391 aa, Fusarium fujikuroi
MNLSILRFHAIVAAAMFTTIAFGEHTSNWAVLVCTSRFWFNYRHLANVLSMYRTVKRLGIPDSQIILMLPDDMACNPRNAFPGTVYSNSDRAVDLYGDNIEVDYRGYEVTVENFIRLLTDRVGAEMPRSKRLLTDDRSNILVYMTGHGGNEFLKFQDAEEIGAFDLANAFEEMWEKKRYHEILFMIDTCQANTMYSRLYSPNIIATGSSKLDQSSYSHHADNDVGVAVIDRYTYYNLEFLENNVKDLNSQKTVGELFDSYDFGKIHSHAGVRYDLFPGGEENARSRLITDFFGNIQNVEVDRSGNLTLEEDLLALSKKIALLQQKEAEAAKESVGEKVSAKAPASAPTEAARKIQKAKALTDGNWWTKKVVGATALAGCGLLWGLGSFLEG

SEQ ID NO: 227 - DNA, 1176 bp, Fusarium graminearum
atgaagctctccaacctttggttccacgccctcgtggcagcggctctgtttgcaacaaccgctttcgccgaacataccagcaactgggctgttctggtctgcacatcgcggttctggttcaactaccgccacctcgccaatgtcctctccatgtaccgaaccgttaagcgtctcggtattcccgactcccagatcatcctcatgcttcccgatgacatggcttgcaatccccgcaatgccttccctggaaccgtctacagcaactccgatcgcgccgttgatctctacggtgacaacattgaggtggactaccgtggctatgaggtcactgtcgagaactttattcgcctcttgactgatcgcgttggcgccgagatgcctcgaagtaagcgcctccttaccgatgatcgaagcaacattctggtgtacatgacgggccacggtggaaatgagtttctcaagtttcaggatgctgaggagattggcgcattcgatctcgccaacgcctttgaggagatgtgggagaagaagagataccatgagatactcttcatgatcgacacttgccaggcgaacaccatgtacagcagactatactctcccaacattatcgccacaggttcctccaagctcgaccaatcatcttattcgcaccacgctgacaacgacgtcggagtcgctgtcattgatcgatatacatactacaacctggaatttctcgagaacaacgtcaaggaccttaacagtcaaaagacagtcggcgaactgtttgacagctacgattacagcaagatccactcccatgcaggcgtgcgatacgatctattccccggtggtgaagaaaacgcccgtagccgccttatcacagacttcttcggcaatatccagaacgtcgaggtcgatcgcagcggaaacctgacccttgaggaggatctcctggcgctcagcaagaagattgctgtattgcaacaaaaggaggcagaggctagcaagaaagaagccggagagaaggtctctgcacaggcacccgccagtgtcccaactggatctgtcagaaagatacaaaagccaaaggctttgacagatgataactggtggaccaagaaggtcgttggcgcaacggcacttgcaggctgcggtcttttatgggccttggggtccttcctcgagggttaa

SEQ ID NO: 228 - protein, 391 aa, Fusarium graminearum
MKLSNLWFHALVAAALFATTAFAEHTSNWAVLVCTSRFWFNYRHLANVLSMYRTVKRLGIPDSQIILMLPDDMACNPRNAFPGTVYSNSDRAVDLYGDNIEVDYRGYEVTVENFIRLLTDRVGAEMPRSKRLLTDDRSNILVYMTGHGGNEFLKFQDAEEIGAFDLANAFEEMWEKKRYHEILFMIDTCQANTMYSRLYSPNIIATGSSKLDQSSYSHHADNDVGVAVIDRYTYYNLEFLENNVKDLNSQKTVGELFDSYDYSKIHSHAGVRYDLFPGGEENARSRLITDFFGNIQNVEVDRSGNLTLEEDLLALSKKIAVLQQKEAEASKKEAGEKVSAQAPASVPTGSVRKIQKPKALTDDNWWTKKVVGATALAGCGLLWALGSFLEG

SEQ ID NO: 229 - DNA, 1176 bp, Fusarium oxysporum
  misc_feature: Fusarium oxysporum f. sp. cubense
atgaagctctcaatacttcgatttcatgccatcgtggcagcgaccatgttcgcaacaatcgctttcgccgagcataccagcaactgggccgttctcgtctgcacatcacgattctggttcaactaccgccatctcgccaatgtcctctccatgtaccgtaccgttaagcgtctgggtatccctgactcccagatcatcctcatgcttcccgacgacatggcctgcaatccccggaacgcgttccctggaaccgtctacagcaattctgatcgcgctgttgatctctacggcgacaacatcgaggtggactaccgtggctacgaggttactgtcgagaactttattcgcctgttgacggatcgcgtgggcgcagagatgccgcgaagcaagcgccttcttaccgatgatcgaagcaacatcctggtttacatgactggtcatggtggaaacgagttcctcaagttccaggatgctgaggagattggcgcgtttgatcttgccaacgcttttgaggagatgtgggagaagaagagatatcacgaaatcctcttcatgatcgatacctgccaagcgaacactatgtacagcagactttactcccctaacatcatcgccaccggttcctccaagctcgatcaatcctcatactcacatcacgccgacaacgatgtaggcgtcgccgtcatcgatcgatacacgtactacaatcttgaattcctcgagaacaacgtcaaggacctgaacagccagaagacagtgggcgaactgttcgacagctacgacttcggcaagattcactcacatgccggagtgcgctacgatctcttccccggcggtgaagaaaatgcccgtagccgtctgatcacagactttttcggcaatatccagaacgtcgaggttgaccgcagcggcaacctgactctcgaggaggatctcctggcgctcagcaagaaaattgcccttctgcagcagagggaagcagaggcagccaaggagtctgttggggagaaggtatctgcaaaaccacctgccagtgctccaactgagacagccaggaagatccaaaaagccaaggcattgacggatgacaactggtggaccaagaaagtcgttggtgcgacagcgcttgcaggttgtggccttctctggactttagggtccttcttggagggttga

SEQ ID NO: 230 - protein, 391 aa, Fusarium oxysporum
MKLSILRFHAIVAATMFATIAFAEHTSNWAVLVCTSRFWFNYRHLANVLSMYRTVKRLGIPDSQIILMLPDDMACNPRNAFPGTVYSNSDRAVDLYGDNIEVDYRGYEVTVENFIRLLTDRVGAEMPRSKRLLTDDRSNILVYMTGHGGNEFLKFQDAEEIGAFDLANAFEEMWEKKRYHEILFMIDTCQANTMYSRLYSPNIIATGSSKLDQSSYSHHADNDVGVAVIDRYTYYNLEFLENNVKDLNSQKTVGELFDSYDFGKIHSHAGVRYDLFPGGEENARSRLITDFFGNIQNVEVDRSGNLTLEEDLLALSKKIALLQQREAEAAKESVGEKVSAKPPASAPTETARKIQKAKALTDDNWWTKKVVGATALAGCGLLWTLGSFLEG

SEQ ID NO: 231 - DNA, 1176 bp, Fusarium pseudograminearum
atgaagctctccgaccttcgattctacgccctcgtggcagcggctctgtttgcaacaatcgctttcgccgaacataccagcaactgggctgttctagtctgcacatcgcggttctggttcaactatcgccacctcgccaacgtcctctccatgtaccgaaccgtcaagcgtctcggtattcccgactcccagatcattctcatgcttcccgatgacatggcttgcaatccccgcaatgccttccccggaaccgtctacagcaactccgatcgcgccgttgatctctacggcgacaacattgaggtggactaccgtggctatgaggtcactgtcgagaactttattcgcctcttgactgatcgcgttggcgccgagatgcctcgaagcaagcgcctccttaccgacgatcgaagcaacattctggtgtacatgacgggccacggtggaaatgagtttctcaaatttcaggatgctgaggagatcggcgcattcgatctcgccaacgcctttgaggagatgtgggagaagaagagataccatgagattctcttcatgatcgacacttgccaggcgaacaccatgtacagcagactatactctcccaacattatcgccactggttcctccaagctcgaccaatcatcatattcgcaccacgccgacaacgacgttggagtcgctgttattgatcgatacacatactataacctggaatttcttgagaacaacgtcaaggaccttaacagtcaaaagacagtcggcgaactgtttgacagctacgattacagcaagatccactcccatgcaggcgtgcgatacgatctattccccggtggtgaagaaaacgcccggagccgccttatcacagatttcttcggcaatatccagaacgtcgaggtcgaccgcagcggaaacttgacccttgaggaggatctcctggcgctcagcaagaagattgctgtattgcaacaaagggaggcagaggccagcaagaaagaagccggagagaaggtctctgcacaggcacccgccagtgtcccaactggatctgccagaaagatacaaaagccaaaggctttgacagatgataactggtggaccaagaaggtcgttggcgcaacagcacttgcaggctgcggtcttctatgggccttggggtccttcctagagggttaa

SEQ ID NO: 232 - protein, 391 aa, Fusarium pseudograminearum
MKLSDLRFYALVAAALFATIAFAEHTSNWAVLVCTSRFWFNYRHLANVLSMYRTVKRLGIPDSQIILMLPDDMACNPRNAFPGTVYSNSDRAVDLYGDNIEVDYRGYEVTVENFIRLLTDRVGAEMPRSKRLLTDDRSNILVYMTGHGGNEFLKFQDAEEIGAFDLANAFEEMWEKKRYHEILFMIDTCQANTMYSRLYSPNIIATGSSKLDQSSYSHHADNDVGVAVIDRYTYYNLEFLENNVKDLNSQKTVGELFDSYDYSKIHSHAGVRYDLFPGGEENARSRLITDFFGNIQNVEVDRSGNLTLEEDLLALSKKIAVLQQREAEASKKEAGEKVSAQAPASVPTGSARKIQKPKALTDDNWWTKKVVGATALAGCGLLWALGSFLEG

SEQ ID NO: 233 - DNA, 1227 bp, Gaeumannomyces graminis
  misc_feature: Gaeumannomyces graminis var. tritici
atgaagctctcccgggtgatgcaattgcccacgctgctggcggcgtcgctcctcgcggccgccccgagcctcgttgcggcggagcacaccagcaattgggccgtcctggtctgcacgtcgcgcttctggtttaactaccgtcacctcgccaacgtgctgtccatctaccgcaccgtgaagcgcctcggcatccccgattcgcagatcatcctgatgctgcccgacgacatggcctgcaacccgcgcaacgccttccctggcaccgtctactccaacgccgaccgcgccgtcgacctgtacggcgacaacatcgaggtcgactaccgcggctacgaggtcaccgtcgagaacttcatccgcctcctgactgaccgcgtcggcgacgagatgccccgcagcaagcgcctgctgaccgacgacaggagcaacatcctggtctacatgacgggccacggtggcaacgagttcctcaagttccaggacgccgaggagattggcgccttcgatctggctgacgccttcgagcagatgtgggagaagaagaggtaccacgaaatcctcttcatgatcgacacctgccaggccaacaccatgtactcgaagctctactcgcccaacatcatcgcgacgggctcttcggagctggaccagtcgtcatactcgcaccacgccgacaacgacgtcggcgtcgccgtcatcgaccgctacacatactacaacctcgagttcctcgaggccgaggtccgcgacatcggcagcaagaagacggtcggcgacctgttcgacagctacaactttgaaaagatccactccaatgccggcgtccgctacgacctgttccccggcggcgccgacgccgcccgcgcccgcctgctgaccgacttctttggcaacgtccagaacgtcgaggtcgacgggccccgaaacgctacgacggccggcgccggcgccggcaccgcccagctagaggaggacctactggtactgagcaggaagattgccgagctgaggaagcgggcggataccgatgatgtggccgcagatggcgatgcccagcctgcttctgcccccagggagcaaggggtcaacacgaggaaccagtccgcgcaaaagaggatacaggtcacaacgtctctcaccgacgacaattggtggaccaagaagctttttggggccacggcggttgccggctgtgctttgttgtggggcgttggctcatttttgtaa

SEQ ID NO: 234 - protein, 408 aa, Gaeumannomyces graminis
MKLSRVMQLPTLLAASLLAAAPSLVAAEHTSNWAVLVCTSRFWFNYRHLANVLSIYRTVKRLGIPDSQIILMLPDDMACNPRNAFPGTVYSNADRAVDLYGDNIEVDYRGYEVTVENFIRLLTDRVGDEMPRSKRLLTDDRSNILVYMTGHGGNEFLKFQDAEEIGAFDLADAFEQMWEKKRYHEILFMIDTCQANTMYSKLYSPNIIATGSSELDQSSYSHHADNDVGVAVIDRYTYYNLEFLEAEVRDIGSKKTVGDLFDSYNFEKIHSNAGVRYDLFPGGADAARARLLTDFFGNVQNVEVDGPRNATTAGAGAGTAQLEEDLLVLSRKIAELRKRADTDDVAADGDAQPASAPREQGVNTRNQSAQKRIQVTTSLTDDNWWTKKLFGATAVAGCALLWGVGSFL

SEQ ID NO: 235 - DNA, 1161 bp, Leptosphaeria maculans
atgaagttctcagctgccctcctgcccttgctggccgcccccatggtcgcaagcgagcatacctcgaattgggcagtgttggtttctacatcacggttctggttcaattatcgacatctggccaatgtgctctctctctaccgtaccgtcaagcgcctgggcattccggattcccaaattatcctcatgttgccagatgacatggcgtgtaaccctcgcaatgcatttccgggaaccgtctacaacaatgctgatcgtgcgctggatctgtatggcgacaatatagaggtcgactatcggggttacgaggtgacggtggagaactttattagattgatgacggaccgtgtgggcgaggacatgccacggtctaagaggttgatgacagatgagcggagtaacatcttggtgtacatgactgggcacggaggaaatgagttcctcaagtttcaagatgcagaggaaatcagtgcctttgatctagcagatgcatttgggcagatgtgggagaagaaaagataccacgaaatgctcttcatgatcgacacctgccaagcaaacaccatgtattctaaattctactcccccaacatcctcgccaccggctcttctgaaatcgaccaatcctcctactctcaccacgcagacaacgacgtcggcgtcgctgtcatcgaccgctacacatactacaacctcgagttcctcgaaacccaggtccgcgacccaacctcaaaactcacaatgggcgatctcttcgacagctacgacgaggagaagatccacagccaccccggcatacgatacgacctgtttgaaggcggagagcacgccgcgcgcaacagaaaagtcatggatttctttggaaatgtgcagaatgtggaggtcgaggcaagcaagaggaatgagacggagtggatggaggatctgagagcgattgagaagatgattgccgaggcgaagagcagacataacgagagtctgggggtgaagccgcagacagagcatgttgttgaaaaagctagaccgatgctgaatgttaggtcagagggtgcggtgcgggtcgatgaggtgcaggactggacgaagcaggcgtatggagctgcggccctgttggggtgcgcgggggtctggctagtaggaagctggctggagtctgtgtaa

SEQ ID NO: 236 - protein, 386 aa, Leptosphaeria maculans
MKFSAALLPLLAAPMVASEHTSNWAVLVSTSRFWFNYRHLANVLSLYRTVKRLGIPDSQIILMLPDDMACNPRNAFPGTVYNNADRALDLYGDNIEVDYRGYEVTVENFIRLMTDRVGEDMPRSKRLMTDERSNILVYMTGHGGNEFLKFQDAEEISAFDLADAFGQMWEKKRYHEMLFMIDTCQANTMYSKFYSPNILATGSSEIDQSSYSHHADNDVGVAVIDRYTYYNLEFLETQVRDPTSKLTMGDLFDSYDEEKIHSHPGIRYDLFEGGEHAARNRKVMDFFGNVQNVEVEASKRNETEWMEDLRAIEKMIAEAKSRHNESLGVKPQTEHVVEKARPMLNVRSEGAVRVDEVQDWTKQAYGAAALLGCAGVWLVGSWLESV

SEQ ID NO: 237 - DNA, 1179 bp, Macrophomina phaseolina
atgcgtccgtttggcagcgcatcgctcttcatcggcgtgtgccttttggccgcacttagttgggcggaacatacctccaactgggccgtcctcgtctcgacgtcgcgtttctggttcaactaccgccaccttgccaatgtgctctccgtataccgtaccgtcaagcgtctcggcatcccggactctcagattatcctgatgcttccggacgatatggcctgcaacccgcgcaacgccttcccgggcactgtttacaacaatgcagaccgcgccttggatctctatggtgataacattgaggtggattaccgcgggtatgaggttacagtggagaatttcatacgtctcatgacagatcgcgtgggagaggatatgccgcgcagcaagcgcctgctgaccgacgaccggagcaacattttggtttacatgaccggtcacggtggcaacgagttcctgaaattccaagatgccgaggaaatcagcgcgtttgatcttgcagacgcctttgagcagatgtgggagaagaaacgttaccacgaaatgctattcatgattgacacatgccaagccaacacgatgtacagcaagttctactcgcccaacatcatcgctactggctcctccgagatcgaccaatcctcctactcgcaccatgcagataatgacgtcggtgtcgccgtcattgatcgctatacatactataacctggaattcttggagacgcaggtcaaggactcttcgtccaagctgacgctgggcgatcttttcgacagctacgatgaggcaaagattcacagccatcctggtgtaagatatgatctgttcgaaggtggagagaaggcagcccgggagagactggtcatggacttttttggcaacgtccaaaatgtagaagtcgatagcgtggggcgcaacgagtcaaagcttcaggaagagctggagtatctgagccggttgatcgaggccgccaagctgaaggccaacgaaagcgagacggccgcagcatatggtgcaggcatcgacaagcaggaggcgtccgtcgaaccaaaaaatgcaaagagattcgaaggggcggccaaggtccaacgagacgatgggtggggcaagcagcttatcggtctttcggccgttgctggcatcactggtttgtgggccgttggaacctggctggagtcctag

SEQ ID NO: 238 - protein, 392 aa, Macrophomina phaseolina
MRPFGSASLFIGVCLLAALSWAEHTSNWAVLVSTSRFWFNYRHLANVLSVYRTVKRLGIPDSQIILMLPDDMACNPRNAFPGTVYNNADRALDLYGDNIEVDYRGYEVTVENFIRLMTDRVGEDMPRSKRLLTDDRSNILVYMTGHGGNEFLKFQDAEEISAFDLADAFEQMWEKKRYHEMLFMIDTCQANTMYSKFYSPNIIATGSSEIDQSSYSHHADNDVGVAVIDRYTYYNLEFLETQVKDSSSKLTLGDLFDSYDEAKIHSHPGVRYDLFEGGEKAARERLVMDFFGNVQNVEVDSVGRNESKLQEELEYLSRLIEAAKLKANESETAAAYGAGIDKQEASVEPKNAKRFEGAAKVQRDDGWGKQLIGLSAVAGITGLWAVGTWLES

SEQ ID NO: 239 - DNA, 1185 bp, Magnaporthe oryzae
atgcagctctctcgtctactccaattgcccacgctgctggccgcggctctcctcgccgtcgcgcctcccgtcgcagcagaacacactagtaactgggccgttctcgtgtgcacttcacgcttctggttcaactatcgccatctggcaaacgttttgtccatgtatcgcaccgtcaagcgcctcggcattcccgactcgcaaatcatcctgatgctgcccgacgacatggcatgcaatccacggaacgccttccccggaaccgtttattccaatgccgaacgcgccgtcgacttgtacggcgacaatatcgaagtcgactatcgcgggtatgaggtcacggtagagaacttcatcaggctgttgacagatagggtgggcgacgagatgccgcggagtaagcggctcttgaccgacgaccgcagcaacatcctagtctacatgacgggccacggtggcaacgagtttctcaagttccaggacgcagaagaaataggggcttttgatcttgccgacgcatttgagcaaatgtgggaaaagaagagatacaacgagatacttttcatgatcgacacttgtcaagccaacacgatgcttaccaagctctactcgccgaacatcattgcgaccggatcctccgaactggaccaatcctcgtactcgcatcacgccgataacgatgttggtgttgccgtcatcgaccgctacacatattacaacctcgattttctcgagaatgaagtcaaggacatcaacagcaagaagactattggcgacctcttcgacagttatacttttgaaaaaatacactctcatgccggcatgcgctacgacctcttcccgggcggagcggacgcagcacgagcaaagctgctgaccgatttctttggaaatgttcaaaatgtagaggttgatgcgaacgtaaccacggggttggacgaggacttgattgctctgagcaagaaaattgctgcgctcaaagccaaggccgaatccgaggaatctgctgccgcctcggagaatcgtgagagttcgaccactgctgcgccaaaagacaaccagtctctgcccaagaggtctcagatcaccaagcctctgactgatgacaactactggaccaagaagattatcagcgccactgccatttctgggtgcgccttgctctggggcttgagctcttatttatag

SEQ ID NO: 240 - protein, 394 aa, Magnaporthe oryzae
MQLSRLLQLPTLLAAALLAVAPPVAAEHTSNWAVLVCTSRFWFNYRHLANVLSMYRTVKRLGIPDSQIILMLPDDMACNPRNAFPGTVYSNAERAVDLYGDNIEVDYRGYEVTVENFIRLLTDRVGDEMPRSKRLLTDDRSNILVYMTGHGGNEFLKFQDAEEIGAFDLADAFEQMWEKKRYNEILFMIDTCQANTMLTKLYSPNIIATGSSELDQSSYSHHADNDVGVAVIDRYTYYNLDFLENEVKDINSKKTIGDLFDSYTFEKIHSHAGMRYDLFPGGADAARAKLLTDFFGNVQNVEVDANVTTGLDEDLIALSKKIAALKAKAESEESAAASENRESSTTAAPKDNQSLPKRSQITKPLTDDNYWTKKIISATAISGCALLWGLSSYL

SEQ ID NO: 241 - DNA, 1173 bp, Marssonina brunnea
  misc_feature: Marssonina brunnea f. sp. multigermtubi
atgaagctcaacagcctcctccagctcccccttcttctcgcgcccttcctggcctcctcccccgtcgcagcagaacacaccagcaactgggccgtcctggtctcaacctcgcgcttctggttcaactaccgccacctcgctaacgtgctctccctctaccgcaccgtcaagcgcctcggcatccccgattcccagatcattctcatgctgcccgacgacatggcttgcaacccgcgcaacgccttccccggtaccgtctactcgaacgccgaccgcgccgttgacctgtatggcgacaacatcgaggtcgattaccgcgggtacgaggtcacggtcgagaacttcatacggctgttgacagatcgcgtgggggaagagatgccgcggagtaagaggctgttgactgacgatcggagtaacatcctggtatatatgacgggccatggggggaacgagtttctgaagttccaggatgcagaggagatcagtgcgtttgatttggcggatgcctttgagcagatgtgggagaagaagagataccatgaacttctcttcatgatcgacacctgccaggcaaatactatgtactccaaattctactcgcccaatatcatcgccaccgggtcctccgaaattgaccagtcctcctattcgcaccacgctgacaacgacgtcggcgtggccgtcattgatcgctacacttattacaacctcgactttctcgagactcaagtgcgggagcctagctccaagaagacactcgcggatctattcgatagttacgacgagagcaagattcacagcgatccaggatttcgatgggacttattcccaggtggagagcaagccgggagagagagactcgtgatggacttctttggcaacgtgcagaatgtagaggttgagggtggggggaacgagagggagtggaaggaggatttgctagcgttaggaaagaagattgctgagttgagagagaaggccgatgctcaggatgcggcgacgaagaatgctacgcttccagagcaagggaagagccacaccacgcggagaatgaaggctgcaaaggttgaagtggatgataattggttaggaaagagagctgtgggagcttgggcgctgcttggatgtgcgctggtctggaccgctgggtcatatttggaggcaatctga

SEQ ID NO: 242 - protein, 390 aa, Marssonina brunnea
MKLNSLLQLPLLLAPFLASSPVAAEHTSNWAVLVSTSRFWFNYRHLANVLSLYRTVKRLGIPDSQIILMLPDDMACNPRNAFPGTVYSNADRAVDLYGDNIEVDYRGYEVTVENFIRLLTDRVGEEMPRSKRLLTDDRSNILVYMTGHGGNEFLKFQDAEEISAFDLADAFEQMWEKKRYHELLFMIDTCQANTMYSKFYSPNIIATGSSEIDQSSYSHHADNDVGVAVIDRYTYYNLDFLETQVREPSSKKTLADLFDSYDESKIHSDPGFRWDLFPGGEQAGRERLVMDFFGNVQNVEVEGGGNEREWKEDLLALGKKIAELREKADAQDAATKNATLPEQGKSHTTRRMKAAKVEVDDNWLGKRAVGAWALLGCALVWTAGSYLEAI

SEQ ID NO: 243 - DNA, 1158 bp, Melampsora larici-populina
atgatccaactctatcaacaccttcaacttttcattttattctcaatcttaacactttcaatcaatcaaagcaatgcatctcaacaatcaaacaattgggcggtcctagtttgcacttcgaggttttggttcaattatagacatgtagctaatacattaggaatgtatcgatctgttaaaaggcttggaattcctgattcgaatatcattctaatgttggcagatgatatggcttgtaatccaagaaacatgtttccggctacagtttatagtaatgctgatagacgattagatctttatggtgatggaatcgaagtagattatagaggtgatgaagtttcagttgaaaactttataagacttttaacaggcagagtagttgatggaactccacgttcaaaaagattaatgagtgatgaaagatctaatatctttgtttatatgacgggtcatggtggtgaagagtttttgaaatttcaagattcagaagaaattagtgcatttgatattgcagatgcatttcaaacgatgtgggcagaaaaacgttataacgagttattttttatgattgatacttgtcaagccaatacaatgctcactaaattctattcaccaaatatctttgcaactggttcatctgctaaaggcgagaattcttactcacatcatgcagatcaagatattggggtggctgttgtggatcggtttagtcattttgttttgagttacttggaaggcctcaacaagacttcaaaggctaatatgcaagaatttgttgatgccttctcattcgatacttgtcactctacgcctgctgctcgtactgatctacttacacgtccattgaaggatatcttgatgactgatttctttggtggcgtaagttcagtagaactgggttcgtcaactcctttgacgatccccaccgaaccaatcgaaactcaaaaatcaatttgggtcacaccaacaccttcctcttctaaaattaaatcacctaaatcttcacctacttctgatactaatgctaaaggtaagaataacgatggtttagaattgttaattgaacaagtcggaaattggcgtgatcaatggatgaaaggtgttttgattttaagtttaacggtaactgctcattttgtggcagctaccatgaaatga

SEQ ID NO: 244 - protein, 385 aa, Melampsora larici-populina
MIQLYQHLQLFILFSILTLSINQSNASQQSNNWAVLVCTSRFWFNYRHVANTLGMYRSVKRLGIPDSNIILMLADDMACNPRNMFPATVYSNADRRLDLYGDGIEVDYRGDEVSVENFIRLLTGRVVDGTPRSKRLMSDERSNIFVYMTGHGGEEFLKFQDSEEISAFDIADAFQTMWAEKRYNELFFMIDTCQANTMLTKFYSPNIFATGSSAKGENSYSHHADQDIGVAVVDRFSHFVLSYLEGLNKTSKANMQEFVDAFSFDTCHSTPAARTDLLTRPLKDILMTDFFGGVSSVELGSSTPLTIPTEPIETQKSIWVTPTPSSSKIKSPKSSPTSDTNAKGKNNDGLELLIEQVGNWRDQWMKGVLILSLTVTAHFVAATMK

SEQ ID NO: 245 - DNA, 1173 bp, Microbotryum lychnidis-dioicae
atgctccaaccacggcagcttctcctccttctcgccctcctcctatcccacctagtcctcctccatgcggcccccagcaccaacaactgggccgtgctcgtctgttcgtcaaggttctggttcaactataggcatatggccaatacacttgccatgtatcgtaccgtcaaacggctcgggatccccgactctcaaatcatcctaatgctagccgacgacgtagcgtgcaatcctcgcaacccgttcgccggtaccgtctactctaacgccgaccgtcgctacgacctctacggtacctcgatcgaagtcgactacaaaggcgaagaagtcagcgtcgagacctttctcagactcttgtccggtcgttttcctgagagcacacccgtcaacaagcgcttgttgacggacgagagaagtaatattttcatttacatgaccggacatggtggggacgagttcctcaagtttcaagactcggaagagatttcggcctttgatttggccgatgcgttgggagcgatgtgggagaagaagaggtatcacgagatcctcttcatggtcgacacctgtcaagccaatacgctatacaccaagttttactcgcccaatatcatcgccaccggttcgagcgcaaagggggaaaattcttattcccaccacgctgataacgacattggcgtcgctgtcaccgaccgctacacgcaccacgtgctcaactaccttgaaggtatcaacaagacttcgaacgcaactctgcaagatttattcgacacgttctcctttgaaaaattcgattccaacgccggcattcgtacggacctctaccctcgccctgtctctcaagtcctcctgaccgactttttcggtggagtagcccaagtcgaaatttccaccgaggaagaattcgattcttcaatcgagctcaatgacattattgatgactcgaattcagaaaatgaagtcgtccccgtcccactcccttcgatccctccaaggcgaagactttcaacttccataacttcaactggttcagaaaaagcttacaaaggggaaacgatccgaccttgttcggtcctcgccgtcgtactcgttttggtcggtttgcaagtcttggcttctaaatttggtcaggcaagtggggacactgagggggtgaagacgaaggtttcttag

SEQ ID NO: 246 - protein, 390 aa, Microbotryum lychnidis-dioicae
MLQPRQLLLLLALLLSHLVLLHAAPSTNNWAVLVCSSRFWFNYRHMANTLAMYRTVKRLGIPDSQIILMLADDVACNPRNPFAGTVYSNADRRYDLYGTSIEVDYKGEEVSVETFLRLLSGRFPESTPVNKRLLTDERSNIFIYMTGHGGDEFLKFQDSEEISAFDLADALGAMWEKKRYHEILFMVDTCQANTLYTKFYSPNIIATGSSAKGENSYSHHADNDIGVAVTDRYTHHVLNYLEGINKTSNATLQDLFDTFSFEKFDSNAGIRTDLYPRPVSQVLLTDFFGGVAQVEISTEEEFDSSIELNDIIDDSNSENEVVPVPLPSIPPRRRLSTSITSTGSEKAYKGETIRPCSVLAVVLVLVGLQVLASKFGQASGDTEGVKTKVS

SEQ ID NO: 247 - DNA, 1197 bp, Mycosphaerella fijiensis
atgcgcctattcagtctgccgtcagctttgctggctctgctggccttgaccgatgtctctgccgcgactcacacctcgaactgggccgttctagtcagcacgtcgcgattctggttcaactatcgtcatctcgcaaacactctcagcctgtaccgcaccgtaaaacgattaggcataccggatagccagattatattgatgttgcccgatgatatggcatgcaaccctcgaaattcatttccgggcagcgtgttcaatgacaagagcaggcaattagacctctacgataatacaggctgggcagaggacatggccggtatgggcggaatcgaggtggactatagaggcaacgaggtcacagtcgagaactttatcaggctgctgaccgatcgctggccggcatcacaccccacgagtaagagattaatgacggacgatcgcagcaatatccttatatacatgactgggcacggtggtaatgagttcttgaagtttcaagacagcgaagaaataagcagcttcgacttggcggatgcatttgagcaaatgtgggagaagaaacggtaccacgaattgctattcatgatcgatacctgccaggcaaatacaatgtatacggctttctacacaccaaatatcattgccactggaagctcggccaaggaccagagctcttatagccatcacgcagaccaagatgttggtgtggctgttatcgacagatggacatattacaacttggagttcctggaaacgagactgaacagcacgtctgcggacgtcagactcggagagctcttcgacttttatactttcgagagggtccacagcgatgctggggtgcgatacgacctgttcccaggcggtgaacaagctgcgagggatcgacgagtgcttgacttcttcggcagcgttcaacgtgtcgaggtcggctccgccaaaggtggcagcctgggagattggaagtctgatctggaagcgctacgtgccatctaccaaaggcagcaggcagaattcgcagaggcgcacccgatcgagcgggaacaggaaagtgaggcaatcattcgtgctgccaaagacgatggaaaggttgcacttgatatggctcaggctggaggagattggggcaagaagctggtcggccttggatcgttgatatcattaggggctgcgtggcttgcgtcgaatgctctgtaa

SEQ ID NO: 248 - protein, 398 aa, Mycosphaerella fijiensis
MRLFSLPSALLALLALTDVSAATHTSNWAVLVSTSRFWFNYRHLANTLSLYRTVKRLGIPDSQIILMLPDDMACNPRNSFPGSVFNDKSRQLDLYDNTGWAEDMAGMGGIEVDYRGNEVTVENFIRLLTDRWPASHPTSKRLMTDDRSNILIYMTGHGGNEFLKFQDSEEISSFDLADAFEQMWEKKRYHELLFMIDTCQANTMYTAFYTPNIIATGSSAKDQSSYSHHADQDVGVAVIDRWTYYNLEFLETRLNSTSADVRLGELFDFYTFERVHSDAGVRYDLFPGGEQAARDRRVLDFFGSVQRVEVGSAKGGSLGDWKSDLEALRAIYQRQQAEFAEAHPIEREQESEAIIRAAKDDGKVALDMAQAGGDWGKKLVGLGSLISLGAAWLASNAL

SEQ ID NO: 249 - DNA, 1173 bp, Nectria haematococca
atgaacctgtccttccttcgattccacgtcctcgtggcagcggcattgttcgcaaccaccatcttcgccgagcataccagcaactgggccgttctcgtctgcacatcacgattctggttcaactaccgccaccttgccaatgtcctctccatgtaccgaaccgtaaagcgcctcggcatccccgactcccagatcatcctgatgctccccgacgacatggcttgcaacccccgcaacgccttccccggaaccgtctacagcaactctgatcgcgccgtcgatctctatggcgacaacattgaggtcgactatcgtggctacgaggttacagtcgagaactttatccgtctgctgacggatcgcgttggcgccgagatgccacgaagcaagcgccttcttaccgacgaccggagcaatatcctggtgtacatgaccggtcatggcggaaacgaattcctcaagtttcaggatgccgaggagattggcgcatttgatcttgccgacgcctttgagcagatgtgggagaagaagagataccatgaaattctcttcatgatcgacacctgccaggccaacaccatgtacagcaggttttactctcccaacatcattgctaccggctcatccgagctcgaccaatcctcatactcgcatcacgccgacaacgatgttggcgtggccgttattgatagatatacctactacaacctagaattccttgagaacaacgtcaaggacttgaacagccaaaagacagttggcgaattgttcgatagttacgactatgacaagatccactcgcacgctggtatgcgttatgatctcttccccggtggcgccgagaacgctcgcagccgtttgattaccgacttctttggcaacattcaaaacgtcgaagtcgacagtgccggcaacctgacccttgaggaggacttgctggcccttagcaagaagattgctttgctacgacaaaaggaagcggaagcggccaaggaagcttcccagggagggtctgccagtgcatccgccagcgccccgactgaagctgcgaagaagatccaaaaggccagggctttgacagatgataactggtggacaaagaaggtggttggcgcaacagctcttgcgggctgcgctcttctctggggcctagggtccttccttgagggttga

SEQ ID NO: 250 - protein, 390 aa, Nectria haematococca
MNLSFLRFHVLVAAALFATTIFAEHTSNWAVLVCTSRFWFNYRHLANVLSMYRTVKRLGIPDSQIILMLPDDMACNPRNAFPGTVYSNSDRAVDLYGDNIEVDYRGYEVTVENFIRLLTDRVGAEMPRSKRLLTDDRSNILVYMTGHGGNEFLKFQDAEEIGAFDLADAFEQMWEKKRYHEILFMIDTCQANTMYSRFYSPNIIATGSSELDQSSYSHHADNDVGVAVIDRYTYYNLEFLENNVKDLNSQKTVGELFDSYDYDKIHSHAGMRYDLFPGGAENARSRLITDFFGNIQNVEVDSAGNLTLEEDLLALSKKIALLRQKEAEAAKEASQGGSASASASAPTEAAKKIQKARALTDDNWWTKKVVGATALAGCALLWGLGSFLEG

SEQ ID NO: 251 - DNA, 858 bp, Puccinia graminis
  misc_feature: Puccinia graminis f. sp. tritici
atggtatcattactactatctaccccatggacttggaggagatgtatctcgatggcggttatcccactcgctattctgacgatggccaaccgatcaaacgctgttgaccattcaaataactgggctgtcttggtttgtacctccaggttttggttcaactatcgacacattgctaataccttgggcatgtatcgctccgtcaaacgactcgggattccagactcaaatatcattctcatgctggcagacgatatggcttgtaatccgaggaacatgtttccaggaacggtctacagcaattctgatcgcaagttagacctctatggggatgggatcgaagtggattatcgaggagaagaagtatcggtggaaaactttatacggttgttgactggccgagtggctgaaggaactccaagatcaaagagactcatgaccgatgaacggtcgaatattctggtttacatgaccggtcatggtggagatgaattcctcaaatttcaagacgccgaggaaatcagcgcattcgatctcgccgatgccttccagacgatgtgggccaaaaagcgatacaatgaactgctcttcatgatcgatacttgccaagccaacacgatgactagcaaattatactctcccaacatcgtcgctactggctcatcagccaagggcgaaaactcatattcgcatcacgcagattctgatatcggcgtagctgttgtagatcgatacagtcactttgttctaagccatctggaagccatgaataaaacatcatcatccactctccaagactttgtgaatgcatattccttcgatatcttccactcgacgcctgctgcacgccgagcgtcctga

SEQ ID NO: 252 - protein, 285 aa, Puccinia graminis
MVSLLLSTPWTWRRCISMAVIPLAILTMANRSNAVDHSNNWAVLVCTSRFWFNYRHIANTLGMYRSVKRLGIPDSNIILMLADDMACNPRNMFPGTVYSNSDRKLDLYGDGIEVDYRGEEVSVENFIRLLTGRVAEGTPRSKRLMTDERSNILVYMTGHGGDEFLKFQDAEEISAFDLADAFQTMWAKKRYNELLFMIDTCQANTMTSKLYSPNIVATGSSAKGENSYSHHADSDIGVAVVDRYSHFVLSHLEAMNKTSSSTLQDFVNAYSFDIFHSTPAARRAS

SEQ ID NO: 253 - DNA, 912 bp, Puccinia striiformis
atggcttgtaatccgaggaacatgtttccgggtacagtatatagtaactcggataggaagttagatttatatggtgatggaatcgaagtggattataggggtgaagaagtatcagttgaaaactttattagattattaactgggagagtggttgaaggcacacctcgatcaaaaagattaatgactgatgaaaggtctaatatcttggtttacatgaccggtcatggcggagatgagttcttgaaatttcaagactcggaagaaattagtgcgtttgatctggccgatgcatttcaaactatgtgggccaaaaaaaggtataacgaattgttatttatgatcgatacttgtcaagcgaatacaatgacgactaaattatattcacctaatataatcgccactggatcatcagcaaaaggtgaaaattcatattcacatcatgcagattctgatatcggtgtagctgtcgtagatagattcagtcatttcgttttaagtcatttagaaggattaaataaaacatccaaatctacattccaagatttcgtcaaggagtttgcgtcggacatctttcattcaacgccagcagcacggacagatttatcaaatagaacgataaatgaagtcttaatgactgatttttttggaggggtcagttcagttgaattagatccaatacctataactactacaactacaatccaagacgaaaaaacccggttgaatgatttgaaacccgaagcaatctggaaattatctacttctaaatggaagataatatcctctgtcaatcatgatgattctttcactacttctcaatcttggattcatctttattggcctcaaatctcgtctactttcctgcttagtttcactcttttggctcatttttgggccgctcattctacttaa

SEQ ID NO: 254 - protein, 303 aa, Puccinia striiformis
MACNPRNMFPGTVYSNSDRKLDLYGDGIEVDYRGEEVSVENFIRLLTGRVVEGTPRSKRLMTDERSNILVYMTGHGGDEFLKFQDSEEISAFDLADAFQTMWAKKRYNELLFMIDTCQANTMTTKLYSPNIIATGSSAKGENSYSHHADSDIGVAVVDRFSHFVLSHLEGLNKTSKSTFQDFVKEFASDIFHSTPAARTDLSNRTINEVLMTDFFGGVSSVELDPIPITTTTTIQDEKTRLNDLKPEAIWKLSTSKWKIISSVNHDDSFTTSQSWIHLYWPQISSTFLLSFTLLAHFWAAHST

SEQ ID NO: 255 - DNA, 1119 bp, Puccinia triticina
atgccatcaacaacaccattcacctcgccggcttggaaaagatgtttaccgctggcgatcatcccactcgctttcctactgctggccaatcgactggatgcggtcaaccactctaacaactgggccgtcttggtttgcacctccagattctggtatcggtccgtgaaacgactcgggattcccgactccaacatcatcctcatgctggcagacgacatggcgtgtaacccaaggaacatgttcccagggacggtttacagtaattcggagaggaagttggacctctacggcgatgggatcgaggtcgattaccgaggagaggaagtgtccgtcgagaactttatccgcttgttgaccggtcgagtggctgaagggactccccgatcgaaaagactgatgaccgatgaacggtctaacatcctggtctatatgaccggtcatggtggagacgagttcctcaaatttcaagacgcagaagagatcagtgcatttgatctcgccgatgcattccagacgatgtgggccaaaaaacggtacaacgagctgcttttcatgatcgatacttgccaggccaatacgatgactagcaaattgtactcgcccaacatcgtcgctaccggttcatcagccaagggcgaaaattcttattctcatcacgcagattctgacattggcgtggctgttgtggatcgatttagtcactttgttttgagtcatctggagggcatgaataaaacatcatcatcaactctccaagactttgttaatgcatattcctacgacatcttccactcaaaccctggtgcacgttcggatctgctgggtcgatcgatgagtgaagtgctaatgacagactttttcggcggggtcagttcggtagaactagccgctttaccagccgacagtccggtggggagcgctgctgagccgacaaagccggaagctatctggaagctgaccacctcccgatggaactcggccaggaggactgcggacgattctttcgccgggccgggtagatctttgcagggtcacgccaactggcggaaactgtccccaaccttgctcctcactcttaccttcgccgcacacttttgggcagcccataaattgacatga

SEQ ID NO: 256 - protein, 372 aa, Puccinia triticina
MPSTTPFTSPAWKRCLPLAIIPLAFLLLANRLDAVNHSNNWAVLVCTSRFWYRSVKRLGIPDSNIILMLADDMACNPRNMFPGTVYSNSERKLDLYGDGIEVDYRGEEVSVENFIRLLTGRVAEGTPRSKRLMTDERSNILVYMTGHGGDEFLKFQDAEEISAFDLADAFQTMWAKKRYNELLFMIDTCQANTMTSKLYSPNIVATGSSAKGENSYSHHADSDIGVAVVDRFSHFVLSHLEGMNKTSSSTLQDFVNAYSYDIFHSNPGARSDLLGRSMSEVLMTDFFGGVSSVELAALPADSPVGSAAEPTKPEAIWKLTTSRWNSARRTADDSFAGPGRSLQGHANWRKLSPTLLLTLTFAAHFWAAHKLT

SEQ ID NO: 257 - DNA, 1125 bp, Pyrenophora teres
atgaagttctccaaagccctcctgccgctactggtgacgcccttcgtcgccagcgaacatacctccaactgggctgtcctcgtatctacatcccgcttctggttcaactaccgccatcttgccaatgtcctgtctctctatcgtaccgtaaagcgcctcggcatccccgactcgcaaatcatcctcatgctccccgatgatatggcttgcaacccgcgcaacgcctttcccggcactgtatacaacaacgcggatcgtgcactcgacttgtacggggacaatattgaagtcgactacagaggatatgaggtcacagtcgagaacttcatcagactgatgacggacagagtgggcgaagatatgccacgaagcaagcggttaatgaccgacgagaggagtaacatcctagtctacatgactggccacggcggcaatgagttcctaaagttccaagacgccgaggaaatcagcgcattcgatctcgcagatgcgttcggccagatgtgggagaagaaacgataccacgaaatcctcttcatgatagatacttgccaagccaacacaatgtactcgaaattctactccccaaacatcctcgcaacaggctcctcggaaatcgaccagtcatcctactcccaccacgccgacaacgacgtcggtgtcgcagtcattgaccgctacacatactacaacctcgagttcctggagaaccaggtcaaggacccaacaagcaaactcacaatgggtgatttgttcgacagctacgatgaggagaagattcatagtcgtcctggaatcagatatgatttgtttaggggcggcgagcacgaggcgaggaacaggagggtcatggatttctttggcaatgtgcagaatgtggaggtggagagcaggaatgaaacggcttggatgcaagagacggagggtgtcgtcaaggtggctaggtcttatgatcacagtgttgagaacgtgagcacagagaagcctgcacagagtagcgtacggagagaaggtgcttggaaggttggcgaggagcaaggctggacaaagcaagcatatggcgctgccgcattagctggctgtgcgggaatatggcttgctggcagctggatagagtctatgtag

SEQ ID NO: 258 - protein, 374 aa, Pyrenophora teres
MKFSKALLPLLVTPFVASEHTSNWAVLVSTSRFWFNYRHLANVLSLYRTVKRLGIPDSQIILMLPDDMACNPRNAFPGTVYNNADRALDLYGDNIEVDYRGYEVTVENFIRLMTDRVGEDMPRSKRLMTDERSNILVYMTGHGGNEFLKFQDAEEISAFDLADAFGQMWEKKRYHEILFMIDTCQANTMYSKFYSPNILATGSSEIDQSSYSHHADNDVGVAVIDRYTYYNLEFLENQVKDPTSKLTMGDLFDSYDEEKIHSRPGIRYDLFRGGEHEARNRRVMDFFGNVQNVEVESRNETAWMQETEGVVKVARSYDHSVENVSTEKPAQSSVRREGAWKVGEEQGWTKQAYGAAALAGCAGIWLAGSWIESM

SEQ ID NO: 259 - DNA, 1128 bp, Pyrenophora tritici-repentis
atgaagttctcaaaagccctcctgccgctactggcgacgcccttcgtcgccagcgaacatacctccaactgggctgttctcgtgtctacatcccgcttctggttcaactaccgtcaccttgccaatgtcctgtctctctaccgtaccgtaaagcgccttggaatccctgactcgcaaatcatcctcatgctccccgatgacatggcttgcaacccgcgcaacgccttccccggcactgtatacaacaacgcggatcgcgcactcgacttatacggcgacaatattgaagtcgactacagaggctacgaagtcacagtggaaaacttcatcaggttgatgacagacagagtgggcgaggacatgccacgaagcaagcggttaatgacggacgagaggagtaacatcctagtctacatgaccggccacggcggcaacgagttcttgaaattccaagacgccgaggaaatcagcgcattcgatcttgcagatgcatttggtcagatgtgggagaagaaacgataccacgaaatcctcttcatgatagatacctgccaagcaaacaccatgtactcgaaattctactctcccaacattctcgcaacaggttcctcagaaatcgaccagtcgtcctactcccaccacgccgacaacgacgtcggtgtcgccgtcatcgaccgctacacatactacaacctcgaattcctggagaaccaggtcaaggacccgactagtaaactcacaatgggcgatttgttcgacagctacgacgaggagaagattcatagccgtcctggaatcaggtacgatttgtttaggggcggcgaacaggaggcgaggaataggagggtcatggatttctttggcaatgtgcaaaatgttgaggtggagggtcggaatgagacggcgtggatgcaagaggcggagggtgttgtcaaggtggctaggtctcatgatcagagcgttgagaatgtgagcacagagaagtctgcacagcgtagcgtacggagagaaggtgcttggaaggttggcgaggagcaaggctggacaaagcaagcatatggtgctgctgcattggctggctgccgttacaacgcctgttctcacgttaatgatacccactgcaagtaa

SEQ ID NO: 260 - protein, 375 aa, Pyrenophora tritici-repentis
MKFSKALLPLLATPFVASEHTSNWAVLVSTSRFWFNYRHLANVLSLYRTVKRLGIPDSQIILMLPDDMACNPRNAFPGTVYNNADRALDLYGDNIEVDYRGYEVTVENFIRLMTDRVGEDMPRSKRLMTDERSNILVYMTGHGGNEFLKFQDAEEISAFDLADAFGQMWEKKRYHEILFMIDTCQANTMYSKFYSPNILATGSSEIDQSSYSHHADNDVGVAVIDRYTYYNLEFLENQVKDPTSKLTMGDLFDSYDEEKIHSRPGIRYDLFRGGEQEARNRRVMDFFGNVQNVEVEGRNETAWMQEAEGVVKVARSHDQSVENVSTEKSAQRSVRREGAWKVGEEQGWTKQAYGAAALAGCRYNACSHVNDTHCK

SEQ ID NO: 261 - DNA, 1167 bp, Scerotinia borealis
atgaagctatccagctttctccggcttcctctggtgcttgcgcctttactctcacctatccccgtcgccgcagagcatacaagcaattgggcagttctcgtatcgacctcacgattctggttcaattatcgccatttggcaaatgttctctcactctatcgcacagtcaaacgactagggattccggattcccagattattctcatgttgcccgatgatatggcatgtaaccctcggaatgccttccccggcacagtctacagtaacgctgatcgcgcggtggatttatatggagataatatcgaggtggactatcgaggatatgaggtcacggtggagaactttattcgactgttaacggacagagttggggaggaaatgccaaggagcaaaaggcttttgacggacgatagaagcaatatcttggtttacatgacaggtcatggtgggaatgagttcttgaaatttcaagacgcggaggaaattagtgcattcgacttggcggatgcatttgagcagatgtgggagaagaagaggtaccacgaattacttttcatgatcgatacatgccaagcgaacaccatgtacagcaaattttactctcccaatataattgcaacgggctcttcggaaattgatcagtcctcatattctcatcatgcggataatgatgttggagtagccgtcattgatcgatacacatactacaatctggacttccttgaaactcaggttcgagaacctggcagcaagaagacattgggcgatttgtttgatagctatgacgaggcaaagattcattcgcatccaggtgtcagatgggatcttttcccaggtggagaggaaagagggagagaaagactattaatggacttcttcggcaatgtacaaaacgtggaagttgacaagatcgcaaacgacacggaatggagagaggatctattatctttgggcaagaagattgccgagctacgtgagcgaactgaagtggcgtcgaagaattctacatcctctacaacccttttcgaaagtcaaccaacacgcagaatacgtgctgcaaaggttgaggtggacaattcttggtgggggaagaaagccgtgggcgcatgggctttagcaggttgttcactcgtttggctcgcaggaacatacctagagtcggcatag

SEQ ID NO: 262 - protein, 388 aa, Scerotinia borealis
MKLSSFLRLPLVLAPLLSPIPVAAEHTSNWAVLVSTSRFWFNYRHLANVLSLYRTVKRLGIPDSQIILMLPDDMACNPRNAFPGTVYSNADRAVDLYGDNIEVDYRGYEVTVENFIRLLTDRVGEEMPRSKRLLTDDRSNILVYMTGHGGNEFLKFQDAEEISAFDLADAFEQMWEKKRYHELLFMIDTCQANTMYSKFYSPNIIATGSSEIDQSSYSHHADNDVGVAVIDRYTYYNLDFLETQVREPGSKKTLGDLFDSYDEAKIHSHPGVRWDLFPGGEERGRERLLMDFFGNVQNVEVDKIANDTEWREDLLSLGKKIAELRERTEVASKNSTSSTTLFESQPTRRIRAAKVEVDNSWWGKKAVGAWALAGCSLVWLAGTYLESA

SEQ ID NO: 263 - DNA, 1167 bp, Septoria nodorum
atgaagttttccgccgccctgctgccgctgctggcagccccctttgtcgccagcgagcacacatcgaactgggccgtccttgtctcgacatcgcgcttctggttcaactaccgccatctcgccaatgtcctgtccctataccgaaccgtaaagcgcctcggcatccccgactcgcaaatcatcctcatgctgcctgatgacatggcatgcaacccgcgcaacgcattcccaggcaatgtgttcaacaacgctgaccgtgcattggacctctacggcgacaacatcgaggtggactatcgaggctacgaagtcaccgtggagaactttatccgcctgatgacagaccgcgtgggccccgacatgcctcgcagcaagcgattgatgaccgacgagaggagtaatatattagtctacatgacgggccacggcggcaacgaatttctcaaattccaagacgccgaggaaatcagcgcatttgatctcgcagatgcattcgggcaaatgtgggagaagaagcgctaccacgaaatgctcttcatgatcgacacctgccaagccaacaccatgtactcgaaattctactcccccaacatcctcgccacaggaagctctgaaatcgaccaatcgtcctactcgcaccacgccgactccgacgtcggcgtcgccgtcatcgaccgctacacgtactataacctcgaattcctcgagcagaaagtcacaagcccgacgtccaagctgaccatgggcgagttgttcgacagctacgactccgcgaagatccactcggatgctggcatacggtacgatttgtttgcgggcggcgaggaaggcgcgaggaatagacgcgtcatggatttctttggaaacgtgcagaatgtggagttacagggtgagggacggaatgagacccagtggaaggaggagctggaggcgattgataggatgattgcggatgcgaagaggaggcataatgagagtttgaatgcgaagccgcaggtggatgtgcagcatgttgttgaggaagccaagccggtgcaagggttgcggagagagggtgcggtgaaggtggatgaggagcaggggtggagtaagcagattgccggtgcggcggcgctggcgggatgtgtaggggtttggcttgccggcagtttgtttgagtcgatgtga

SEQ ID NO: 264 - protein, 388 aa, Septoria nodorum
MKFSAALLPLLAAPFVASEHTSNWAVLVSTSRFWFNYRHLANVLSLYRTVKRLGIPDSQIILMLPDDMACNPRNAFPGNVFNNADRALDLYGDNIEVDYRGYEVTVENFIRLMTDRVGPDMPRSKRLMTDERSNILVYMTGHGGNEFLKFQDAEEISAFDLADAFGQMWEKKRYHEMLFMIDTCQANTMYSKFYSPNILATGSSEIDQSSYSHHADSDVGVAVIDRYTYYNLEFLEQKVTSPTSKLTMGELFDSYDSAKIHSDAGIRYDLFAGGEEGARNRRVMDFFGNVQNVELQGEGRNETQWKEELEAIDRMIADAKRRHNESLNAKPQVDVQHVVEEAKPVQGLRREGAVKVDEEQGWSKQIAGAAALAGCVGVWLAGSLFESM

SEQ ID NO: 265 - DNA, 1119 bp, Setosphaeria turcica
  misc_feature: Setosphaeria turcica (strain 28A)
atgaagttttctacgatactcgcgcctttgctggccgcagcaccctttgccgccagcgaacacacatccaactgggcggtcctcgtctcgacgtcgcgcttctggttcaactaccgccaccttgccaatgtgctttctgtgtaccgcaccgtgaagcggctgggcatcccagactctcaaatcatcctcatgctccccgacgacatggcatgcaatccgcgcaacgccttccccggaaccgtctacaacaatgccgaccgcgcactcgacttgtacggcgacaacatcgaggtcgactacagagggtacgaggtgacggtcgaaaacttcatccggctgatgacggaccgcgtgggcgaggacatgccacgaagcaagcgcctgatgacggacgagcgcagcaacatcctcgtctacatgactggccacggcggcaacgaattcctcaagttccaggacgccgaggaaatcagcgcctttgatctcgccgacgcctttggccagatgtgggagaagaaacgctaccacgaaatcctcttcatgatcgacacgtgccaggcaaacaccatgtactcgaaattttattcccccaacatcctcgcgacaggatcctcggaaatcgatcaatcgtcgtactcgcaccacgctgacaacgacgtcggcgtcgccgtcatcgaccgctacacgtactacaacctcgagttcctggagaaccaggtcaaggaccccacgagcaaactgacaatgggcgacttgttcgatagctacgacgaggaaaagattcacagtcaccccggtatccggtacgatctctttgcgggaggagagcaggaagcgaggaatagaaaggttatggacttctttggcaatgtgcagaatgtcgaggtggacagccgtaacgagacgggctggatacgagaggcagggagcgctttcagagcggccaaatcgcacgatcagaatgtggccaatgtcagccagcagccagtcgagagtgcacggaaagaaggcgcttggaaagtggatttggagcagggctggactaggcaggcttatggcgctgcggccctggctggatgtgcgggcatttggctcgttggaagctggctagagtccatg

SEQ ID NO: 266 - protein, 373 aa, Setosphaeria turcica
MKFSTILAPLLAAAPFAASEHTSNWAVLVSTSRFWFNYRHLANVLSVYRTVKRLGIPDSQIILMLPDDMACNPRNAFPGTVYNNADRALDLYGDNIEVDYRGYEVTVENFIRLMTDRVGEDMPRSKRLMTDERSNILVYMTGHGGNEFLKFQDAEEISAFDLADAFGQMWEKKRYHEILFMIDTCQANTMYSKFYSPNILATGSSEIDQSSYSHHADNDVGVAVIDRYTYYNLEFLENQVKDPTSKLTMGDLFDSYDEEKIHSHPGIRYDLFAGGEQEARNRKVMDFFGNVQNVEVDSRNETGWIREAGSAFRAAKSHDQNVANVSQQPVESARKEGAWKVDLEQGWTRQAYGAAALAGCAGIWLVGSWLESM

SEQ ID NO: 267 - DNA, 1230 bp, Sphaerulina musiva
atgcgtctcctcgagctacctacagcccttttggcgctcctcgctgctcttcccgatgtgggcgcgacgcacacctcgaattgggcggtcctggtcagcacctcccgcttctggttcaactaccgccatctcgccaataccctctctctctaccgcaccgtaaagcgtctggggatacccgacagccaaatcatcctcatgctccccgatgacatggcctgcaatccgcgcaactcctttcccggcagtgtcttcaatgacaaatcgcgccaactcgatctgtacgacgaccagagcggcaatcatggaggacaagcagggggaaccacgacgggaatgagaggcatcgaagtcgattatcggggcaatgaagtcaccgtggagaatttcattcgtctcctgaccgatcgatggccctcgtctcatccgacgtccaaacgactcatgactgacgaccggtcgaatatcttgatttacatgacggggcatggcggaaatgaatttttgaaatttcaagacagtgaggaaatcagctcgtttgatctggcggatgcgtttgcgcaaatgtgggagaagaagagatatcatgagctgctcttcatgattgatacgtgtcaggcgaataccatgtatccggcattctatacgccgaatatcattgccacggggagcagtgccaaggatcagagtagttattcgcatcatgcggatcaggatgtcggggtggcggtgattgatcggtggacatattataatttggagtttttggaaacgaggttaaatagtacgagtgcggatgtgcggctgggggagctgtttgattattatacgtttgatcgcgtgcatagtgacgccggtgtgaggtatgatttgttcccgggcggagaggaggaagggaggaatcggagggtgttggacttttttgggagtgtgcagggcgtggagacgagtggattggatgagatgcaggcaggggattggaagaaggatttggaggccttgcagcagattatggagaggcagaagaaagaagaagaagaggaggaaatgcagcatgctgctacgcaagagatggccagtgaggcttcaacacgggccactcgggacgacagaggacatggcaaagtcgctttggatatggctcaaggaggtgaaggctgggtcaagaaggtcgttgggctggggtctctgctggctgtaggaggcgcatggctcctgaccaagtcctaa

SEQ ID NO: 268 - protein, 409 aa, Sphaerulina musiva
MRLLELPTALLALLAALPDVGATHTSNWAVLVSTSRFWFNYRHLANTLSLYRTVKRLGIPDSQIILMLPDDMACNPRNSFPGSVFNDKSRQLDLYDDQSGNHGGQAGGTTTGMRGIEVDYRGNEVTVENFIRLLTDRWPSSHPTSKRLMTDDRSNILIYMTGHGGNEFLKFQDSEEISSFDLADAFAQMWEKKRYHELLFMIDTCQANTMYPAFYTPNIIATGSSAKDQSSYSHHADQDVGVAVIDRWTYYNLEFLETRLNSTSADVRLGELFDYYTFDRVHSDAGVRYDLFPGGEEEGRNRRVLDFFGSVQGVETSGLDEMQAGDWKKDLEALQQIMERQKKEEEEEEMQHAATQEMASEASTRATRDDRGHGKVALDMAQGGEGWVKKVVGLGSLLAVGGAWLLTKS

SEQ ID NO: 269 - DNA, 1199 bp, Ustilago hordei
atgagaaacggctcccccttcctcccctcttcactccccactgctggtgttaaatcaacctgactcactcccccaaagaaatctgtcaccttgacatcccccacctctctcccaaacagatccgtcctcaaccccggatctgactctatcacactagaatcataactctcgaacaaatccttcatcgttgcatcagtcgtcttatccttcccttccatccactccagtacaaaattcgtaaatctatcaatcatagctacacccagatcgtagtcggctccgtgactgtaactgttctgacctttcccgctggaacctgtcgcaagcacgttcggggaatagatcttagtatacagggtgttagcttggcaggtatctaccatgaagaatagttcgtggtatcgttttttttgccacatttgttcgatcgcgtcggcgatatccaccgcagagatttcttcatagtcttggaacttgagaaattcgtcccctccgtgtccagtcatatataagaagacgttggatcgggcatcgctattcaacctcttgctctttggagtggtcggtgggaggcgtcctgtgagaagtcgtatgaggttttcgaccgaaacttggtatccacgatagtcaacttctatgttgtgtccgtacaggtcgagtcggttggctgtggaagcccatacattgccaggaaacttgttgcgtgggttacaagcggcatcgtctgcaagcatcaaaatgatgttcgagtcagggattccaagacgcttgactgtgcgatacatgccgagagtgttggctatgtgtcgatagttgaaccaaaatttggaggtgcagactaggaccgcccagttgttcgtatgtccacctcgaaccgcattggaggtactgttgagggtgctggaaagaggggtgctagtggaaaattgtacaaaggaggagaggggtgtggagtcgaaaaattgtgttacttgtgctatttgtgattgtgtaaggaataggtcagggtatattaatggggcgcaaaccgcaaggaggaggatggaaagtgggagaaggagtaggcggaggattttccgtcgtggtgatgtggttgtgggcgttgttgaggtgcaacgccgtgtagttgtggttgtggtggtggtggtcttcttctctgtgattgtggtggttttttctacggttgtggcggccgtcat

SEQ ID NO: 270 - protein, 400 aa, Ustilago hordei
MTAATTVEKTTTITEKKTTTTTTTTTRRCTSTTPTTTSPRRKILRLLLLPLSILLLAVCAPLIYPDLFLTQSQIAQVTQFFDSTPLSSFVQFSTSTPLSSTLNSTSNAVRGGHTNNWAVLVCTSKFWFNYRHIANTLGMYRTVKRLGIPDSNIILMLADDAACNPRNKFPGNVWASTANRLDLYGHNIEVDYRGYQVSVENLIRLLTGRLPPTTPKSKRLNSDARSNVFLYMTGHGGDEFLKFQDYEEISAVDIADAIEQMWQKKRYHELFFMVDTCQANTLYTKIYSPNVLATGSSGKGQNSYSHGADYDLGVAMIDRFTNFVLEWMEGKDKTTDATMKDLFESYDSSVIESDPGLRTDLFGREVGDVKVTDFFGGVSQVDLTPAVGSEEGRKGEPFLM

SEQ ID NO: 271 - DNA, 1212 bp, Ustilago maydis
atgacagccgtcgactttccggtaactgctgctgcgctagaccagcagcggatgcagccaaagcagcgcgatccgagagtaagtgatgcgaaaccatcctcgagcggtttgcgagcacgcttgacgcgacgagcagcactacgctcgatcgtgctcagcctgctcgtagcagcactagctagtgtggcgataccgttcgcgtttcccgaacttgtcttgtcttcggagaaagtggccatagtgacgcagttcttcgagcgctcagggctgcacgatgcgctacaaaccatcgatttgtatggaccagattctgcttccgaatcgcaccttgagtcaacgccatcctcacccacgcttcgaggaggtcacacgaacaactgggcggtgctggtgtgcacctccaagttctggttcaactaccgtcatatcgccaacacgctcggcatgtaccgcaccgtgaagcggctcggcattccagacagcaacatcatcctcatgttggccgacgatgcggcgtgcaacccacgcaacaaattccccggtaacgtgtgggcttcgacagcgaaccgcctagacctgtacgggcacaacattgaagtcgactaccgcggctacgaggtgtcagtggaaaatctgatacgcctgctgaccggtcggctaccacccacgacgcccaaatccaaacgcctcgaaagcaacgctcgctccaacgtctttctctacatgaccggccatggcggcgacgaattcctcaaattccaagactacgaagaaatctcggccgtcgatatcgcagacgccatcgaacagatgtggcagaaaaaacgctaccaccaactcttcttcatgatcgacacctgccaggctaacacaatgtacagcaaaatctactctcccaacgtcctcgccacaggttccagcgaaaaaggccagaacagctacagtcacaacgctgacgatgacctcggcgtagccatgatcgaccgattcaccaactttgtcctcgaatggatggaaaccaaagacaaatcctccaacgccaccatgaaggatctcttcaacgcatacgatccaggcgtcatcgaaagcgatcccggtgtaagaacagatctctttgcgagagatctgagccaggtcaagcttaccgatttcttcggcggcgtgagtcagatcgatctgattgatagaaacagcgagctgacgctcatgtga

SEQ ID NO: 272 - protein, 403 aa, Ustilago maydis
MTAVDFPVTAAALDQQRMQPKQRDPRVSDAKPSSSGLRARLTRRAALRSIVLSLLVAALASVAIPFAFPELVLSSEKVAIVTQFFERSGLHDALQTIDLYGPDSASESHLESTPSSPTLRGGHTNNWAVLVCTSKFWFNYRHIANTLGMYRTVKRLGIPDSNIILMLADDAACNPRNKFPGNVWASTANRLDLYGHNIEVDYRGYEVSVENLIRLLTGRLPPTTPKSKRLESNARSNVFLYMTGHGGDEFLKFQDYEEISAVDIADAIEQMWQKKRYHQLFFMIDTCQANTMYSKIYSPNVLATGSSEKGQNSYSHNADDDLGVAMIDRFTNFVLEWMETKDKSSNATMKDLFNAYDPGVIESDPGVRTDLFARDLSQVKLTDFFGGVSQIDLIDRNSELTLM

SEQ ID NO: 273 - DNA, 1248 bp, Verticillium dahliae
atgctgctgtcgaatgtcctccagctacccgtcctgttggctgccgctgcgctggcaccagcagctcttgccgagcataccagcaactgggccgttctcgtcggtacctcgcggttctggtttaactatcgccacatgtccaatgtcttgtccatctaccgcaccgtcaagcgactaggcattcccgactcccagatcatcctcatgctgcccgacgacatggcctgcaacccccgcaacgccttccccggaactgtctacagcaactcggaccgcgccgtcgatctgtacggcgacaacatcgaggtcgactaccgaggctatgaagtcaccgtcgagaactttattcgactcatgaccgatcgtgtgggcgccgagatgcctcgcagcaagcgtctcttgaccgatgagcggagcaacattctggtgtacatgacaggccacggcggaaatgagttcctgaagtttcaggatgccgaggagattggcgcgttcgacctggcagacgcttttgagcaaatgtgggagaagaagagatacaacgagatcctcttcatgatcgacacgtgccaggccaacaccatgtacagcaagctctactccccgaacatcatcgccaccggctcctccaagcttgaccagtcatcctattcccaccacgccgaccaggacgttggcgttgccgtcatcgaccgcttcacctactacaacctcgagttcctcgagaaccaggtcaaggatatgagcagtcagaagaccattggcgagctcttcgacagctacgactttgagaagatacactcccatccgggcgtgcgctacgacctcttcaagggcggtgccgacgaggcgcgcagccgtcgcatcactgacttcttcggcaacgttcagcaggtcgaggttgacggagctaagagcctggcactcgaggaggaacttctcgagctgagccgcaagattgctgcgctgagggtccaggcggatgagcaggatgcagctgcgcggaacgcgacggccccggcggcggctgtacctgtgaccgcaaccaagaagattcagtttgctcagccgttgaccaacgacaactggtgggccaagaagatcatcggagccaccgccttggcggcatgtgtcgggctctgggttctggggtcctatctagagccgtccaggagtgagaacgcagaggacccagtggaggctgagaagaaggaggcgcaaaacggatcagttaaggtgaaggcatag

SEQ ID NO: 274 - protein, 415 aa, Verticillium dahliae
MLLSNVLQLPVLLAAAALAPAALAEHTSNWAVLVGTSRFWFNYRHMSNVLSIYRTVKRLGIPDSQIILMLPDDMACNPRNAFPGTVYSNSDRAVDLYGDNIEVDYRGYEVTVENFIRLMTDRVGAEMPRSKRLLTDERSNILVYMTGHGGNEFLKFQDAEEIGAFDLADAFEQMWEKKRYNEILFMIDTCQANTMYSKLYSPNIIATGSSKLDQSSYSHHADQDVGVAVIDRFTYYNLEFLENQVKDMSSQKTIGELFDSYDFEKIHSHPGVRYDLFKGGADEARSRRITDFFGNVQQVEVDGAKSLALEEELLELSRKIAALRVQADEQDAAARNATAPAAAVPVTATKKIQFAQPLTNDNWWAKKIIGATALAACVGLWVLGSYLEPSRSENAEDPVEAEKKEAQNGSVKVKA

SEQ ID NO: 275 - DNA, 1215 bp, Zymoseptoria brevis
atgcggctcctctcgctcccgactgcgctgctagcgctcctctccgccatcgatgtctcttccgcgacccacacgtccaactgggcggtgctcgtgagcacgtcgcgcttctggttcaactaccgacatctggccaacacattaagcctctacagaacagtaaagcgactcgggattccggacagccagattatcctcatgcttcctgacgacatggcttgcaatccgcgcaattcgtttccagggagcgttttcaacgacaagagccggcaattggacctgtatgatgacaagagcacaatggagaacatggcgggcatgggaggaattgaagtggactaccgagggaatgaggtgacagtggaaaacttcatacgattgttgaccgatcgctggcctgcgtcgcatcccacatccaagcggctgatgacggacgaccgatccaatatcctcatatacatgactggacacggtgggaacgagttcttgaagttccaggacagcgaagagatcagttcgtttgatctagcggacgcctttgagcagatgtgggagaagaagcgatatcacgagctcctattcatgatcgacacgtgtcaggccaacacaatgtaccctgcgttctacaccccaaacattattgctactggaagtagtgccaaggatcagagctcgtacagccatcacgcggatcaggacgtgggcgtggcagtcatcgacaggtggacatactacaacctggagttcctcgagacaagactgaacagtacttccgcggacaccagactgggagaactgtttgattcctacacttttgaaaaagtgcacagtgatgctggagtacggtacgatttattccccggcggcgagcctgcagtgagggaccgacgagtcctggacttctttggcagcgtgcaaggagtggaggtagatgcatcacatgagaataccagcaatgattggaaggctgatttggaggcactccggaagatcatggagaggcaaagaacagagatgacagagatgaatgggacgccaaatctgcagggcgacaagagagcgggggccacactccaggcgggccagccaggcaaaatagctctcaatatggcacagaagagtgaagattgggtcaacaagattgccggtttggggtctttgctggttcttggtggtgcttgggttgtgtcgaatgtcctcacgaggacgagctga

SEQ ID NO: 276 - protein, 404 aa, Zymoseptoria brevis
MRLLSLPTALLALLSAIDVSSATHTSNWAVLVSTSRFWFNYRHLANTLSLYRTVKRLGIPDSQIILMLPDDMACNPRNSFPGSVFNDKSRQLDLYDDKSTMENMAGMGGIEVDYRGNEVTVENFIRLLTDRWPASHPTSKRLMTDDRSNILIYMTGHGGNEFLKFQDSEEISSFDLADAFEQMWEKKRYHELLFMIDTCQANTMYPAFYTPNIIATGSSAKDQSSYSHHADQDVGVAVIDRWTYYNLEFLETRLNSTSADTRLGELFDSYTFEKVHSDAGVRYDLFPGGEPAVRDRRVLDFFGSVQGVEVDASHENTSNDWKADLEALRKIMERQRTEMTEMNGTPNLQGDKRAGATLQAGQPGKIALNMAQKSEDWVNKIAGLGSLLVLGGAWVVSNVLTRTS

SEQ ID NO: 277 - DNA, 954 bp, Zymoseptoria tritici
ctcctctcactcccgactgcgctgctggcgctcctcgccgctctcgatgtctcttccgcgacccacacgtccaactgggcggtgctcgtgagcacgtcgcgcttctggttcaactaccgacatctggccaacacattaagcctctacagaacagtaaagcgactcggcattccggacagccagatcatcctcatgcttccagatgacatggcttgcaatccgcgcaattcatttccggggagcgttttcaacgacaagagccgacaattggacctgtatgatgacaagagcacaatggagaacatggcgggcatgggaggaattgaagtggactaccgagggaatgaggtgacagtggagaacttcatacgattgttgaccgatcgctggcctgcgtcgcatcccacatccaagcggctgatgacggacgaccgatccaatatcctcatatacatgactggacacggtggaaacgagttcttgaagttccaggacagcgaagagatcagttcgtttgatctagcggacgcctttgagcagatgtgggagaagaagcgatatcacgagctcctattcatgatcgacacgtgtcaagccaacacgatgtaccctgcgttctacacgccaaacattattgctactggaagtagtgccaaggatcagagctcgtacagtcatcacgcggatcaggatgtgggcgtggcagtcatcgacaggtggacatactacaacctggagttcctcgagacaagactgaacagtacctccgcggataccagactaggggaactgtttgattcctacactttcgaaaaagtgcacagtgatgctggagtacggtacgatttattccccggcggagagccagcagtcagggaccgacgagtgctggacttctttgggagcgtgcaaggagtggaggtagatgcatcacatgagaatgccagcaatgat

SEQ ID NO: 278 - protein, 254 aa, Zymoseptoria tritici
MLPDDMACNPRNSFPGSVFNDKSRQLDLYDDKSTMENMAGMGGIEVDYRGNEVTVENFIRLLTDRWPASHPTSKRLMTDDRSNILIYMTGHGGNEFLKFQDSEEISSFDLADAFEQMWEKKRYHELLFMIDTCQANTMYPAFYTPNIIATGSSAKDQSSYSHHADQDVGVAVIDRWTYYNLEFLETRLNSTSADTRLGELFDSYTFEKVHSDAGVRYDLFPGGEPAVRDRRVLDFFGSVQGVEVDASHENASND

SEQ ID NO: 279 - DNA, 1447 bp, Alternaria solani
atggcgaagacatacaagcagatgaaggaggcctgggtgtctggacataccgggagctccgtggcagacgttaacagcgtctcgctcgcaatgcctgtaccgtacacacacccactactcgagcaatgaccccttactgactgcatgcatagctgagcattctgctgtggtccgtcatacagtcgcgcatgcgcctctttacgccctacactccacctgccttcttggttgacttcctgctcaactgcggagccacgttgttcgcgactaccatttactcgcattcaccatggatactgaacctccttctgctgctcccagcacttgcgctttacgtcttcgagaagccggtcgcggcgaaagacccccctcgaccgcccaagattgataaatccgaaaaggacaccaagctcgatgcactccccgtgaagccgttcattacgaattaccgtggcgcaatgatggtcataacatgtgttgctattctggcagtcgacttccgcgtctttcctcggcgcttcgcaaaagtggagaactggggtacatcgctcatggatatgggggtgggctccttcgtcttcacggctggcgtagtatctgtccgggcttcgctcaaggaaggagccggccgccagccgctatccaagcgcctcacagcatccttcagacatgccatcccccttctggtcctcggcactatacgactcatctccgtcaaagggctggactatgctgaacatgtaaccgaatatggtgttcactggaacttcttcttcacccttggcttcttgcccccattcgccgctctctgccaatcggcattcgatttggtaccgtcctatgccgttctttcttttgtcctggctgctgcatatgagattgctcttgactggacctcgctcggatcgttcatgctggtagctccacggaccgacctcctctctcagaaccgagaaggcattttctctttctccggctatctcgccatcttccttgcaggccagtcactgggtgcgtccgcactaccaaggcaacagccgatcgcaaaggacgcatcaatccaggttaagctccgacaatccacgtttggcaagctgatcatgacttccgtgtgttggacagccctcttctatttctcaaccagctactacggtctgcgactctccgtatcgcggcgcctggccaacctcccttacttcctctgggtctcgtcgtttaacagttaccaaatcaccatctgctacgctatcgaaagttttctcttcccaaacttgtacaatgccaagaccaaagaggaggaagttcgaagaggcagagacgctactagcactgtgttgtatgcctacaaccgcaatggtctggcagtcttccttgtagcgaatctacttaccggtctggtcaacatgacattcccaaccttgcatatgactgttttgcagtccatggg

SEQ ID NO: 280 - protein, 464 aa, Alternaria solani
MAKTYKQMKEAWVSGHTGSSVADVNSVSLAMPLSILLWSVIQSRMRLFTPYTPPAFLVDFLLNCGATLFATTIYSHSPWILNLLLLLPALALYVFEKPVAAKDPPRPPKIDKSEKDTKLDALPVKPFITNYRGAMMVITCVAILAVDFRVFPRRFAKVENWGTSLMDMGVGSFVFTAGVVSVRASLKEGAGRQPLSKRLTASFRHAIPLLVLGTIRLISVKGLDYAEHVTEYGVHWNFFFTLGFLPPFAALCQSAFDLVPSYAVLSFVLAAAYEIALDWTSLGSFMLVAPRTDLLSQNREGIFSFSGYLAIFLAGQSLGASALPRQQPIAKDASIQVKLRQSTFGKLIMTSVCWTALFYFSTSYYGLRLSVSRRLANLPYFLWVSSFNSYQITICYAIESFLFPNLYNAKTKEEEVRRGRDATSTVLYAYNRNGLAVFLVANLLTGLVNMTFPTLHMTVLQSMG

SEQ ID NO: 281 - DNA, 1530 bp, Cercospora beticola
atgcaggccgccgcctttctgtgggccatgctgcagactcgacaaaacttcttcaaacaatacacccttgccgcagcattctccgacttcctaattcaatgcggttccattctgttcgctacgaccgtctatgctggagctccacaggttctcaatggcttactcatcctcccagccgttgcagcttttctgcaacctagcccagaagtcaaaaaggcggccaagcctccttcaaaagttgctggcaaggacgattcttcagatgacaagaccgccgacgataaaaatccattacctgtgaagcccttcatcacggcttatcgcggtgccatgatgatcatcacatgttccagtatcctagctgttgatttcccaatcttcccacgacgcttcgcgaagacagaatcgttcggtacatcactcatggacatgggcgttggctcattcgtcttcgcagctggtattgtcgctgcacggcaacaactcaaagaggacaacgaggcgtcgcgatcactggtgaagcgtctgaaatctgcgcttaggcactctctaccactggcggttctgggctttgttcgacttctgagtgtcaagaagctcgactacgcggaacatgtgagcgaatatggcgttcactggaactttttcttcacactggcgcttctttcgccagcgatagccatcttgcagccggtactacgactaacccagtatgttggtggctacaacatatttgcgttcgtgctcgcaatctgctacgaactcatactcttctgcgtaccggacatgaaggtctacatcattctctcagaaaggaaaccaggcgattggctgtcgcagaacagagaaggcgtcttctcctttatcggctatttggccatcttcattgctggcatgggcgctggtgttaacatcttgcccagggatccagagcctggcgcgaagaagctgcctgagaaggaccctctcgacgcagacgaagagtggttggccgccgttcttggcgcggccgagaacgagggcgagaagaaggatgcggcacctccaccaatcaaaatgcctcagctcaagccagaatggcccaagtcaacgctgccccgactaggtgccttgttcttcatgtggttcatcttctccacgtgggcgatgtggagatatggccctcgcctgtttgtttcacggcgtatggcaaatcttgcatatgtttgttgggtatgcgcattcaactatggacagcttcttctgttcaacgtcattgaagctggcatgttccccaatctgtacaatgcgaaaacgaaggaggcagagcaaacacggattcgtgaggcgactagcccagtgatgcgtgcctacaaccgcaacggtttggccatctttctgctggccaaccttctcactggactgttcaacatgaccatgccgaccattcacatggcagacgtacctgctatgactgtgttggtgagctacatggctgtcctgactggagtcgctctagtgttggaccggtacgacatctcgatcaaacta

SEQ ID NO: 282 - protein, 510 aa, Cercospora beticola
MQAAAFLWAMLQTRQNFFKQYTLAAAFSDFLIQCGSILFATTVYAGAPQVLNGLLILPAVAAFLQPSPEVKKAAKPPSKVAGKDDSSDDKTADDKNPLPVKPFITAYRGAMMIITCSSILAVDFPIFPRRFAKTESFGTSLMDMGVGSFVFAAGIVAARQQLKEDNEASRSLVKRLKSALRHSLPLAVLGFVRLLSVKKLDYAEHVSEYGVHWNFFFTLALLSPAIAILQPVLRLTQYVGGYNIFAFVLAICYELILFCVPDMKVYIILSERKPGDWLSQNREGVFSFIGYLAIFIAGMGAGVNILPRDPEPGAKKLPEKDPLDADEEWLAAVLGAAENEGEKKDAAPPPIKMPQLKPEWPKSTLPRLGALFFMWFIFSTWAMWRYGPRLFVSRRMANLAYVCWVCAFNYGQLLLFNVIEAGMFPNLYNAKTKEAEQTRIREATSPVMRAYNRNGLAIFLLANLLTGLFNMTMPTIHMADVPAMTVLVSYMAVLTGVALVLDRYDISIKL

SEQ ID NO: 283 - DNA, 818 bp, Diplodia maydis
cgcctgcttagcgtcaagggcctcgactacgccgagcatgtcaccgagtacggtgtgcactggaacttcttcttcacgctgggcttcttgccaccctttgtggctgtgtttcagtccgcgctcaagtatgtcccgtcctacgctgccctcgccctcatcctcggagtcagttaccaggtcctgctggagagcacgggcctgaaggcttatctcctcgctgcgccgcgggtcgacctcctgtccatgaaccgagaagggatattcagcttctttgggtacctggccatcttcctggccggccaggacaccgggatgtatgtgctccctcggaacatcacccgtactggatccagcgcggcgactcagagagccaccttgctcatgatgatggctgtacggagtctcgtgtggctgctgctgttcttcttttccacgaactacaactatggggcgggactgtcagtgtctcgcaggctggccaatctcccatatatcttgggggtggtttccttcaacacggtccagctcatggtctgttgcctcgtcgagacgatgttcttcccttcattctacaacgcggccgacacccaggcggagaaggaggcgtatgagatcgccacccccagggtgctgcgcgcgtacaaccgcaacggcctcgcggtctttctcattgccaacctcctgacaggactggtcaacatgacagttccaacgctggatgtcgggccggtcgccagcgtggggatattggttgcgtacagtgcagtcctgacgggcgtggctgtagccctggacgcgtacaatatttcgatcaagct

SEQ ID NO: 284 - protein, 272 aa, Diplodia maydis
RLLSVKGLDYAEHVTEYGVHWNFFFTLGFLPPFVAVFQSALKYVPSYAALALILGVSYQVLLESTGLKAYLLAAPRVDLLSMNREGIFSFFGYLAIFLAGQDTGMYVLPRNITRTGSSAATQRATLLMMMAVRSLVWLLLFFFSTNYNYGAGLSVSRRLANLPYILGVVSFNTVQLMVCCLVETMFFPSFYNAADTQAEKEAYEIATPRVLRAYNRNGLAVFLIANLLTGLVNMTVPTLDVGPVASVGILVAYSAVLTGVAVALDAYNISIK

SEQ ID NO: 285 - DNA, 1470 bp, Bipolaris maydis
atggcgaaaacgtacaagcagatgaaagaggcgtgggtgtcgggacatacgggaagctctgtagcagatgtaaatatcgtctcgctctccatgcctctgagcatcttgctatggtcggtcatacagtcgcgtctgcgcttgttcacgccttatacgccaccagccctgttcatcgactttctactcaactgcggagctacgctgttcgcaaccaccatctactcgccctctccattgattctcaacctcctgttgctgctcccagcaattgcactctacgtccttgagaaaccagttccggccaaggaagctccacgaccgcccaagatcgacaaatctgaaaatgactccaaactggatgcactacctgtcaagccgttcatcacaaattaccgcggcgcaatgatggtcatcacgtgcgtcgcaattctggccgtcgactttcgcgtctttccacggcggtttgctaaagttgagaactggggcacgtcactcatggacatgggtgtcgggtcctttgtctttaccgctggtgtggtttcagtccgctcttcactcaaggaaggcactggccgaccgccactatctagacgcctgacagcatcactcagacatgcgattccccttcttgtccttggtgtcattcgactcatctccgtaaagggactggactacgcagagcatgtctctgaatacggcgtgcattggaacttcttctttaccctgggcttcctaccaccattcgctgctctttttcagtcggcatttgaactggtcccttcgtatgctgtgctctcgtttgtactggctgccatctacgaagttgtcttggactggacatctcttgggccctacatacttgtggctccgcgtacagatttgctctctaagaaccgagaagggatattctctttctttgggtatcttgcgatttttctagcaggccaatccctgggtgcgtctgcactccctaggcagcagccaatcgccaaagacgcatcaatgacaacaaaactccgacaatctacgcttgggaagcttgcgactacatctctcttttggactgcacttttctacttctctacaagctactacggccttcgcttaccggtatcaagacggctcgctaatcttccgtacttcctctgggtgtcttcgttcaacagctatcaaatcaccatatgctgcgcgattgagactgtactctttcccaacttgtacaaggccacaaacaaaagcgaggaactacgacgcactagagacgccactagtactatactgtatgcgttcaaccgcaatggtcttgttgttttcttagtcgccaatctgctgacaggtctggtaaacatgacgttacccactttgaacatgagcatcattgaatcgatggcggtcctcacagcatacatcgctgtcgtggctggagtcgctgttggtctcgaccatttcaatgtaacgataaaactctga

SEQ ID NO: 286 - protein, 489 aa, Bipolaris maydis
MAKTYKQMKEAWVSGHTGSSVADVNIVSLSMPLSILLWSVIQSRLRLFTPYTPPALFIDFLLNCGATLFATTIYSPSPLILNLLLLLPAIALYVLEKPVPAKEAPRPPKIDKSENDSKLDALPVKPFITNYRGAMMVITCVAILAVDFRVFPRRFAKVENWGTSLMDMGVGSFVFTAGVVSVRSSLKEGTGRPPLSRRLTASLRHAIPLLVLGVIRLISVKGLDYAEHVSEYGVHWNFFFTLGFLPPFAALFQSAFELVPSYAVLSFVLAAIYEVVLDWTSLGPYILVAPRTDLLSKNREGIFSFFGYLAIFLAGQSLGASALPRQQPIAKDASMTTKLRQSTLGKLATTSLFWTALFYFSTSYYGLRLPVSRRLANLPYFLWVSSFNSYQITICCAIETVLFPNLYKATNKSEELRRTRDATSTILYAFNRNGLVVFLVANLLTGLVNMTLPTLNMSIIESMAVLTAYIAVVAGVAVGLDHFNVTIKL

SEQ ID NO: 287 - DNA, 1470 bp, Bipolaris oryzae
  misc_feature: Bipolaris oryzae ATCC 44560
atggcgaaaacgtacaagcagatgaaagaggcgtgggtgtcgggacatacggggagctctgtagcagatgtaaatatcgtctcgctcgcaatgcctctgagcattttgctatggtcggtcatacagtctcgtatgcgtttgttcacgccttatacgccagcagccctgttcatcgactttctgctcaattgcggagctacgctgttcgcaaccaccatctactcaccctctccattgattctcaacctcctcttgctactcccagcaattacactatatgtccttgagaagcctgctccagccaaggaagccccgcgaccgcccaagattgacaagtctgaaaaggactctaaactggatgcactacctgtcaagccgttcatcacaaattaccgtggcgcaatgatggtcatcacatgcgttgcaattttggccgtcgactttcgcgtctttccacgacgattcgctaaagtcgagaactggggcacgtcactcatggacatgggcgtcgggtcctttgtcttcaccgctggcgtggtttcagtccgctcttcactcaagcaaggcactggccgaccgccactatctaaacgcttgacagcatcattcagacatgccattccccttcttgtccttggtgtcattcgacttatctccgtaaagggactggactacgcagagcatgtcactgaatacggcgtgcattggaacttcttcttcaccctgggcttcctaccaccatttgctgctctttttcagtcagcatttgatctagtcccttcgtatgctgtgctgtcgttcgtactggctgccgtctacgaagttgtcttagactggacatctcttggaccctacatacttgtggccccgcgtacagatttgctctccaagaaccgggaagggatattctccttctttggatatcttgcgattttcctagccggccagtctctgggtgcgtctgcactccctaggcagcagccaatcgcgaaagacgcaccgatgacaacaaaactccgacaatccacacttgggaaacttgcgactacatctctcgtctggactgcgcttttctacttctctacaagttactacggccttcgattatccgtctcaagacgtctcgcaaatcttccgtactttctctgggtgtcttcgttcaacagctatcaaatcactatatgctgtgcgattgagactgttctctttcccagcttgtacaaggccacaaacaaaagtgaggaactacgacgcactagagacgccactagtactatactgtatgcattcaaccggaatggtcttgtggttttcttagtggccaatttactgacaggtctggtcaacatgactctacccactttgaacatgagtatcattgaatcgatgacggtcctcatagcatacattgctgtcgtggctggagtcgctgttgttctcgaccattacaatgtaacgataaagctttga

SEQ ID NO: 288 - protein, 489 aa, Bipolaris oryzae
MAKTYKQMKEAWVSGHTGSSVADVNIVSLAMPLSILLWSVIQSRMRLFTPYTPAALFIDFLLNCGATLFATTIYSPSPLILNLLLLLPAITLYVLEKPAPAKEAPRPPKIDKSEKDSKLDALPVKPFITNYRGAMMVITCVAILAVDFRVFPRRFAKVENWGTSLMDMGVGSFVFTAGVVSVRSSLKQGTGRPPLSKRLTASFRHAIPLLVLGVIRLISVKGLDYAEHVTEYGVHWNFFFTLGFLPPFAALFQSAFDLVPSYAVLSFVLAAVYEVVLDWTSLGPYILVAPRTDLLSKNREGIFSFFGYLAIFLAGQSLGASALPRQQPIAKDAPMTTKLRQSTLGKLATTSLVWTALFYFSTSYYGLRLSVSRRLANLPYFLWVSSFNSYQITICCAIETVLFPSLYKATNKSEELRRTRDATSTILYAFNRNGLVVFLVANLLTGLVNMTLPTLNMSIIESMTVLIAYIAVVAGVAVVLDHYNVTIKL

SEQ ID NO: 289 - DNA, 1470 bp, Bipolaris victoriae
  misc_feature: Bipolaris victoriae FI3
atggcgaaaacgtacaagcagatgaaggaggcgtgggtgtcgggacatacggggagctctgtagcagatgtaaatatcgtctcgctcgcaatgcctctgagcatcttgctatggtcggtcatacagtcgcgtatgcgcttgttcacgccttatacgccaccagccatgttcatcgactttctactcaactgcggagctacgctgttcgcaaccaccatctactcgccctctccattgattctcaatctcctcctgctactcccagcaattgcattatatgtccttgagaagcccgctccagccaaggaagtcccgcgtccgcccaagatcgacaagtctgaaaaagactccaaactggatgcactacctgttaagccgttcatcacaaattaccgcggcgcaatgatggtcatcacgtgcgtcgcaatcctggccgtcgactttcgtgtctttccacggcggttcgctaaagtcgagaactggggtacctcactcatggacatgggtgtcgggtcctttgtcttcactgctggcgtggtttcagtccgctcttcactcaaggaaggcactggccgaccgccactatccaaacgcttgatggcatcactcagacattccgttccccttcttgtccttggtgtcattcgactcatctccgtaaagggactggactacgcagaacatgtctctgaatatggcgtgcattggaacttcttctttaccctgggcttcctaccaccatttgcggctcttttccagtcggcatttgacctggtcccttcatatgctgtgctgtcgttcgtactggctgccgtctacgaagttgtcttagattgcacgcctcttggaccctacatacttgtggccccacgtacagatttgctctccaagaaccgagaagggatattctccttctttggatatcttgcgattttcctagccggccagtccctgggtgcgtctgcactccctagacagcagccaatcgccaaagacgcaccaatgacaacaaaactccggcaatccacgcttgggaagcttgcaactacatctctcctttggaccgcacttttctacttctctacaagctactatggccttcgcttaccagtatcaagacggcttgctaatcttccgtactttctctgggtgtcttcgttcaacagttatcaaatcaccatatgctgcgcaattgagactgttctctttcccagcttgtacaaggccacaaacaaaagcgaggaaatacgacgcactagagacgccactagtactatactgtatgcgttcaaccgcaatggtcttgcggttttcttagtcgccaatttgctgacaggtctggtcaacatgacgctacccactttgaacatgagcgtcattgaatcaatggcggtcctcacggcatacgtcgctgtccttgctggattcgctgttggtcttgaccattacaatataacggtaaagctatga

SEQ ID NO: 290 - protein, 489 aa, Bipolaris victoriae
MAKTYKQMKEAWVSGHTGSSVADVNIVSLAMPLSILLWSVIQSRMRLFTPYTPPAMFIDFLLNCGATLFATTIYSPSPLILNLLLLLPAIALYVLEKPAPAKEVPRPPKIDKSEKDSKLDALPVKPFITNYRGAMMVITCVAILAVDFRVFPRRFAKVENWGTSLMDMGVGSFVFTAGVVSVRSSLKEGTGRPPLSKRLMASLRHSVPLLVLGVIRLISVKGLDYAEHVSEYGVHWNFFFTLGFLPPFAALFQSAFDLVPSYAVLSFVLAAVYEVVLDCTPLGPYILVAPRTDLLSKNREGIFSFFGYLAIFLAGQSLGASALPRQQPIAKDAPMTTKLRQSTLGKLATTSLLWTALFYFSTSYYGLRLPVSRRLANLPYFLWVSSFNSYQITICCAIETVLFPSLYKATNKSEEIRRTRDATSTILYAFNRNGLAVFLVANLLTGLVNMTLPTLNMSVIESMAVLTAYVAVLAGFAVGLDHYNITVKL

SEQ ID NO: 291 - DNA, 1470 bp, Bipolaris zeicola
  misc_feature: Bipolaris zeicola 26-R-13
atggcgaaaacgtacaagcagatgaaggaggcgtgggtgtcgggacatacggggagctctgtagcagatgtaaatatcgtctcgctcgcaatgcctctgagcatcttgctatggtcggtcatacagtcgcgtatgcgcttgttcacgccttatacgccaccagccatgttcatcgactttctactcaactgcggagctacgctgttcgcaaccaccatctactcgccttctccattgattctcaatctcctcctgctactcccagcaattgcattatatgtccttgagaagcccgctccagccaaggaagtcccgcgtccgcccaagatcgacaagtctgaaaaagactccaaactggatgcactacctgttaagccgttcatcacaaattaccgcggcgcaatgatggtcatcacgtgcgtcgcaatcctggccgtcgactttcgtgtctttccacggcggttcgctaaagtcgagaactggggtacctcactcatggacatgggtgtcgggtcctttgtcttcactgctggcgtggtttcagtccgctcttcactcaaggaaggcactggccgaccgccactatccaaacgcttgatggcatcactcagacattccgttccccttcttgtccttggtgtcattcgactcatctccgtaaagggactggactacgcagaacatgtctctgaatatggcgtgcattggaacttcttctttaccctgggcttcctaccaccatttgcggctcttttccagtcggcatttgacctggtcccttcatatgctgtgctgtcgttcgtactggctgccgtctacgaagttgtcttagattgcacgcctcttggaccctacatacttgtggccccacgtacagatttgctctccaagaaccgagaagggatattctccttctttggatatcttgcgattttcctagccggccagtccctgggtgcgtctgcactccctagacagcagccaatcgccaaagacgcaccaatgacaacaaaactccggcaatccacgcttgggaagcttgcaactacatctctcctttggaccgcacttttctacttctctacaagctactatggccttcgcttaccagtatcaagacggcttgctaatcttccgtactttctctgggtgtcttcgttcaacagttatcaaatcaccatatgctgcgcaattgagcctgttctctttcccagcttgtacaaggccacaaacaaaagcgaggaaatacgacgcactagagacgccactagtactatactgtatgcgttcaaccgcaatggtcttgcggttttcttagtcgccaatttgctgacaggtctggtcaacatgacgctacccactttgaacatgagcgtcattgaatcaatggcggtcctcacggcatacgtcgctgtcctggctggattcgctgttggtcttgaccattacaatataacgataaagctatga

SEQ ID NO: 292 - protein, 489 aa, Bipolaris zeicola
MAKTYKQMKEAWVSGHTGSSVADVNIVSLAMPLSILLWSVIQSRMRLFTPYTPPAMFIDFLLNCGATLFATTIYSPSPLILNLLLLLPAIALYVLEKPAPAKEVPRPPKIDKSEKDSKLDALPVKPFITNYRGAMMVITCVAILAVDFRVFPRRFAKVENWGTSLMDMGVGSFVFTAGVVSVRSSLKEGTGRPPLSKRLMASLRHSVPLLVLGVIRLISVKGLDYAEHVSEYGVHWNFFFTLGFLPPFAALFQSAFDLVPSYAVLSFVLAAVYEVVLDCTPLGPYILVAPRTDLLSKNREGIFSFFGYLAIFLAGQSLGASALPRQQPIAKDAPMTTKLRQSTLGKLATTSLLWTALFYFSTSYYGLRLPVSRRLANLPYFLWVSSFNSYQITICCAIEPVLFPSLYKATNKSEEIRRTRDATSTILYAFNRNGLAVFLVANLLTGLVNMTLPTLNMSVIESMAVLTAYVAVLAGFAVGLDHYNITIKL

SEQ ID NO: 293 - DNA, 1521 bp, Blumeria graminis
  misc_feature: Blumeria graminis f. sp. tritici.
atgtctcaaagttcccaggaagctgcgacagcgagatacaaagctttgaaagaagatttcgtgtccaaccttacgggcggcaccattagcgaaatcaactacgtgactgccgtagcacccgtagcagttatactctggtctatcttgcaatcgcgtcacggccttttcaattcgccgaatgtctggacaatcacaactgatttcctcattaatgtcgttgccattctactcgctacaacgctgtatgccttcaatccgctattgctcagtattcttctcctagcacccgcttgcctcctcttgctactcccgcctctcgcaaagccgcaaaagaagacgaatctcaagtctttgaagagagcaggtcttcaacatgaagtcgtttcaccgacggatcctcgctatcgcctaccgaagcgccctttcttaaccatgtatcgtgggagcatgcttgtaattacctctctgtctattctatccgtggactttcgcatttttcctcgacgtttcgccaaagttgaaaactggggcacgtccttgatggacgtaggcgttggctcgtttgtgttttcggcgggtattgtggccatgcgctcgatcatactatcagaaaaccagcaggcaggtctctttagaagattattgaaatctgggcggcatagcctgccgctgctggtcttaggcctcctacggctttggagtgtaaaggagctagactacgcagaacatgtgtccgaatacggggtacattggaatttcttctttactctcggtctcctacctccctttgtcaccctctttcaatcagcattccgctatctaccttcgtatgctgggctcgcagtcgtgctcgcaactgcctatcagcttgcattagaatacactaatctcaaggcatacatattggtcgcgccgcgagtagatattttgagcatgaatcgagagggaatattcagtttcatcggatacctcgccatatttctcgccgggcaaggaactggtctctttgtgctgccgcgacatctcctccccactaatacctcgggctggcagcaaaggaaacagctcttacttaaactcattagctggtcaatattctgggtagtgctattcatattcagcaccaatagagtctacgggcttaatttacaagtatcacgtcgcctcgcaaacttaccctacttcttttggattgccgcattcaactcttgccaactgactgtattctgccttgtggaaacgcttttatttcccgatgtctggaagtcaatgaactgtttgtcgaaaacggaggaagaagagttatatcgtggcgctactagtcggattctggatgccttcaatcgtaacgggctctttgtattccttgtagccaatttgttaacaggtgccgtgaatttatccatttcgacgctgcagtgtggacataaacttgccttttctatcctagtcgtgtacggtgccttagttacgagcgtggctttgttcttggacaggttggatgtcagtgtaaaaatatag

SEQ ID NO: 294 - protein, 506 aa, Blumeria graminis
MSQSSQEAATARYKALKEDFVSNLTGGTISEINYVTAVAPVAVILWSILQSRHGLFNSPNVWTITTDFLINVVAILLATTLYAFNPLLLSILLLAPACLLLLLPPLAKPQKKTNLKSLKRAGLQHEVVSPTDPRYRLPKRPFLTMYRGSMLVITSLSILSVDFRIFPRRFAKVENWGTSLMDVGVGSFVFSAGIVAMRSIILSENQQAGLFRRLLKSGRHSLPLLVLGLLRLWSVKELDYAEHVSEYGVHWNFFFTLGLLPPFVTLFQSAFRYLPSYAGLAVVLATAYQLALEYTNLKAYILVAPRVDILSMNREGIFSFIGYLAIFLAGQGTGLFVLPRHLLPTNTSGWQQRKQLLLKLISWSIFWVVLFIFSTNRVYGLNLQVSRRLANLPYFFWIAAFNSCQLTVFCLVETLLFPDVWKSMNCLSKTEEEELYRGATSRILDAFNRNGLFVFLVANLLTGAVNLSISTLQCGHKLAFSILVVYGALVTSVALFLDRLDVSVKI

SEQ ID NO: 295 - DNA, 1503 bp, Botrytis cinerea
atgtcgcgggcagcggaagcagctatggctgctagttataaaagcttgaaggaggagttcgtgtcaaatttgacaggtggaggaattggagaaattaatatggttactgctgtcgctccagtcgcagttatcctttggtcagctttacagagccgccagtattttttcgcaccatataccccaattgctttcgctgtcgacttcctcctcaatgtcggggctattcttcttgcgatttctgtctacgcagatatgcctctcatattgaatctcttactccttgcgccagttccattgttatatgcaattccaccacagaagactacacaaaaggccccgccaaagaaatcaagaatgccacaatcaaaagcgaagccttcagacgaattgaatcctcttccaaagaaacctttccttaccatctatagaggggcgatgatggttatcacttgtatagctatacttgcagtcgatttcaggattttcccacgaaggtttgctaaggtagaaaactggggaacgtcgttaatggacatgggagtaggatctttcgtattttcaggtggtcttgtgggcgctcgtccgatactcaaagaacagaatgctggtcgaacaacgaagctcagcacacgcttatacaactcgatacgccatgcactaccattgattgctctcgggaccatacgtttatacagtgtcaaaggattggactatgcggagcatgttactgaatatggagtgcactggaatttcttctttacccttgcattcattcctccattcgtagcgatatttcagtctgcgtttcagctcatcccgtcatacgccctgttggccgtaatcctcggctccttgtatcaagttacgctcgaatataccagcctcaaagcgtttatactcacagcaccaagaacagatctattttcgaagaatcgtgaaggaatctttagtttctttggctacctcgcaatatttctggcgggtcaagcaactggaatgtttgtattaccacgcaattctatacccacgggaggtccagttgctcagagaaaacgcctcttgatgaaaatgggtacatggtcaggagtgtggattgccctctacttcttcacgacaaattacagatatggaatggcattaagtgtatcacgccgccttgcgaaccttccgtatttcctatgggtttcagctttcaattgctcacaattgactgcattttgtttggtggaaacgatattctccccggcggctcataaaagcatggatgcgaagacggaaaaggagaattacgaactctcaacaagtcgagtccttgaagcatttaacagaaatggcctggccatcttcttggctgcaaatctactcacaggactcgtcaacctgaccatcccaactttatttgtcagcaatctccaagctatggggatattactactttatgcctctgctttgacaggacttgccgtaggtttggatgtatacgacatctccatcaaaatgtaa

SEQ ID NO: 296 - protein, 500 aa, Botrytis cinerea
MSRAAEAAMAASYKSLKEEFVSNLTGGGIGEINMVTAVAPVAVILWSALQSRQYFFAPYTPIAFAVDFLLNVGAILLAISVYADMPLILNLLLLAPVPLLYAIPPQKTTQKAPPKKSRMPQSKAKPSDELNPLPKKPFLTIYRGAMMVITCIAILAVDFRIFPRRFAKVENWGTSLMDMGVGSFVFSGGLVGARPILKEQNAGRTTKLSTRLYNSIRHALPLIALGTIRLYSVKGLDYAEHVTEYGVHWNFFFTLAFIPPFVAIFQSAFQLIPSYALLAVILGSLYQVTLEYTSLKAFILTAPRTDLFSKNREGIFSFFGYLAIFLAGQATGMFVLPRNSIPTGGPVAQRKRLLMKMGTWSGVWIALYFFTTNYRYGMALSVSRRLANLPYFLWVSAFNCSQLTAFCLVETIFSPAAHKSMDAKTEKENYELSTSRVLEAFNRNGLAIFLAANLLTGLVNLTIPTLFVSNLQAMGILLLYASALTGLAVGLDVYDISIKM

SEQ ID NO: 297 - DNA, 1470 bp, Cochliobolus sativus
atggcgaaaacgtacaagcagatgaaagaggcgtgggtgtcgggacatacggggagctcagtagcagatgtaaatatcgtctcgctcgcaatgcctctgagcatcttgctatggtcggtcatacagtcgcgtatgcgcttgtttacgccttatacgccaccagccctgttcatcgactttctactcaattgcggagctacgctgttcgcaaccaccatctactcgccctctccattgattctcaacctcctcttgctgctcccagcaattgcactgtatgtccttgagaagcccgctccagccaaggaagccccgcgaccgcccaagatcgacaagtctgaaaaagactccaaactggatgcactacctgtcaagccgttcatcacaaattaccgcggcgcaatgatggttatcacgtgcgtcgcaattctggccgtcgactttcgcgtctttccacggcggttcgctaaagtcgagaactggggcacgtcactcatggacatgggcgtcgggtcctttgtctttaccgctggcgtggtttcagtccgctcttctctcaaggaaggcactggccgaccgccactatccaaacgcttgacggcatcactcagacattccattccccttcttgtccttggtgtcgttcgactcatctccgtaaagggactggactacgcagaacatgtctctgaatacggcgtgcattggaatttcttctttaccctgggtttcctaccaccatttgctgctctttttcagtcggcatttgacctggttccttcgtatgctgtgctgtcgttcgcactggctgccgtctacgaagttgtcttagactggacatctcttggaccctacatacttgtggccccacgtacagatttactctccaagaaccgagaagggatattctccttctttggatatcttgcgattttcctagccggccaatccctgggtacatctgcactccctaggcagcagccaatcgccaaagacgcaccaatgacaacaaaactccgacaatccacgcttgggaagcttgcgactacatctctcctctggactgcactattctacttctctacaagctactatggccttcgtttaccggtgtcaaggcgtctcgcaaatcttccgtactttctctgggtgtcttcgttcaacagctatcaaatcactatatgctgcgcgattgagactgttctctttcccagcttgtacaaggccacaaacaaaaacgaggaactacggcgcactagagacgccactagtactatactgtatgcgttcaaccgcaatggtcttgcggttttcttagtcgccaatttgctgacaggtctggtcaacatgacgctaccaactttgaacatgagcgtcgttgaatcaatggcggtccttacagcatatatcgctgttgtggctggagtcgctgttggtctcgactattacaacgtaacgataaagctatga

SEQ ID NO: 298 - protein, 489 aa, Cochliobolus sativus
MAKTYKQMKEAWVSGHTGSSVADVNIVSLAMPLSILLWSVIQSRMRLFTPYTPPALFIDFLLNCGATLFATTIYSPSPLILNLLLLLPAIALYVLEKPAPAKEAPRPPKIDKSEKDSKLDALPVKPFITNYRGAMMVITCVAILAVDFRVFPRRFAKVENWGTSLMDMGVGSFVFTAGVVSVRSSLKEGTGRPPLSKRLTASLRHSIPLLVLGVVRLISVKGLDYAEHVSEYGVHWNFFFTLGFLPPFAALFQSAFDLVPSYAVLSFALAAVYEVVLDWTSLGPYILVAPRTDLLSKNREGIFSFFGYLAIFLAGQSLGTSALPRQQPIAKDAPMTTKLRQSTLGKLATTSLLWTALFYFSTSYYGLRLPVSRRLANLPYFLWVSSFNSYQITICCAIETVLFPSLYKATNKNEELRRTRDATSTILYAFNRNGLAVFLVANLLTGLVNMTLPTLNMSVVESMAVLTAYIAVVAGVAVGLDYYNVTIKL

SEQ ID NO: 299 - DNA, 1500 bp, Colletotrichum fioriniae
  misc_feature: Colletotrichum fioriniae PJ7
atgtccgacgctacggccgcgagctacaagaagctcaaggaagactttgtctccaacctctctggtggctccgcctccgaagtcaactatgtgactgcagttgctcccgtcgccgtcctgctatggtctgtagtccaatctcgccaatccttcttcaaaccctacacgctgttgggagctgtcgccgacttcctcctcaacgtcaccgccatcctactgtccacgactctctacgcctcctcccccttgctactctgcgccctcctcctcggccccgccgtcctcatctacaccctgcctcccaacttcggcgccagtcgcaagaagcccgctataccacccaatgcgaagcccacggccggctccggtgcggggccgctctccgtactgcccgtaaagcctttcctgacacactaccggggtagcatgctggtcatcacttgcatcgccatcctcgccgtcgacttccgcctctttccgcgccgcttcgccaaggtcgagacatggggaacatcgctgatggacatgggcgtcgggtccttcgtcttcagcgccggtgttgtcgctgctcggcccgtcttgaaagagcgcgccgaaggtcgatcgatacccttgacgacacgtctgctgcagtcgatgcgccactccttaccgctactcgtcctgggcgtcatccgcttgctcagcgttaagggtctcgattacgccgaacatgtcaccgagtatggcgttcactggaacttcttcttcacgctgggtttcctgccgccgtttgttgccctcttccagtccgcgctcaaggttgtgcctagctacgccgctcttgcaatcatcctgagtgtgctgtatcaggtggctctggagagcaccgacctgaaggcttacatcctgaccgccccaaggaccgacctcttctcaaagaaccgagaaggtatcttcagcttcttcggctacctggccatcttccttgcgggacaggatacgggaatgtacgtcctacctcgaagtctgaacaccaaaagcgattctactcctgctactcagcgcaagacgcttctcatgatgatggccatatggtctgctttgtggacagggctatactttttgaccaccagcaacagctacggtgacggtctgaacgtctcacgtcgtctcgcgaacctgccctatgtcctgtggacagcggcgttcaactcgacacaacttctagcctatgctctagtggacactttcttcttcccatctttctacaatgcgactgacgcgaagaccgagaaggaggcgtatcatacagcgaccagcagggtattccgcgcctacaatcgcaacggcctgttcttgttcctcatcgcaaatgtcttgacaggactggtcaacatgacggtgccgacactgaatgttgggcccatggcaacgatgggtatcttggttgcatatagcggagcaatcacagccatcgctctcggactggacgaatacaatatctccatcaaactatag

SEQ ID NO: 300 - protein, 499 aa, Colletotrichum fioriniae
MSDATAASYKKLKEDFVSNLSGGSASEVNYVTAVAPVAVLLWSVVQSRQSFFKPYTLLGAVADFLLNVTAILLSTTLYASSPLLLCALLLGPAVLIYTLPPNFGASRKKPAIPPNAKPTAGSGAGPLSVLPVKPFLTHYRGSMLVITCIAILAVDFRLFPRRFAKVETWGTSLMDMGVGSFVFSAGVVAARPVLKERAEGRSIPLTTRLLQSMRHSLPLLVLGVIRLLSVKGLDYAEHVTEYGVHWNFFFTLGFLPPFVALFQSALKVVPSYAALAIILSVLYQVALESTDLKAYILTAPRTDLFSKNREGIFSFFGYLAIFLAGQDTGMYVLPRSLNTKSDSTPATQRKTLLMMMAIWSALWTGLYFLTTSNSYGDGLNVSRRLANLPYVLWTAAFNSTQLLAYALVDTFFFPSFYNATDAKTEKEAYHTATSRVFRAYNRNGLFLFLIANVLTGLVNMTVPTLNVGPMATMGILVAYSGAITAIALGLDEYNISIKL

SEQ ID NO: 301 - DNA, 1509 bp, Colletotrichum graminicola
atgtctgacgctacggccgcgagctacaagaagctcaaggaggacttcgtctcaaacctctctggtggttccgcttcagaaatcaactacgtgactgcagtcgctcccgtcgccgtcctgctatggtccgttctccagtcccgccagtccttcttcaagccatacactgtgctgggagctgtcctcgactacctcctcaacgtcaccgccattctcctctccacgactctctacgcttcctcccccctcctcctgagcgcactactcctcgcccccgccgccttaacctacgccttccctcccaatctcggcgccagtcgcaaaaagcctgccataccccccaatgccaagtccaaggccgccgccgcgggcactcctaaagcgtcgccttcggcgttgcccctcaagccgtttctgacgcactatcgtggcagcatgctcgtcgtcacctgcatcgccatcctcgccgttgacttccgccttttcccccgccgcttcgccaaggttgagacctggggcacatcgctgatggatatgggcgtcggctccttcgtctatagtgctggccttgtcgctgcgagacctgtcgtgaaggagcgcgccgagggtagatcgacacccctgacaacgcgcctgttgcaatcgatgcgccattccttaccgctacttgtgctgggtgtcatccgcctgctcagcgtcaagggcctcgattacgccgaacatgtctccgagtacggtgtacactggaacttcttcttcacactcggcttcctgccgccctttgtagccatcttccagtccgccctcaagattgtccccagctacgccgccctcgccatcattctcagtgttctgtaccaggtcgccctcgagagcacggatctgaaggcctacattctgaccgcaccaagagtagacctgctttccaagaaccgagaaggtatattcagcttcttcggctacctggccatcttccttgctggccaggacacgggcatgtacgtcctgcctcgcagcatcaaccccaagagcgacggcaccccttccacccagcggaagacgcttctcttgaccatggccgtatggtctgctgtgtgggccagtcttttcttcttgaccacaagctacagctatggcgacgggttgagtgtttcgcgtcgtcttgcgaacctgccctacgtactttggacagcagccttcaactcaacgcagcttttggcctatgcggttgtcgataccctcttcttcccatcgtcttacaacgccgccgacgccaaggcggagagggaggcttacgagactgccacaagcagggtcctccgtgcgtacaatcgtaacggtttgttcctattccttgtcgccaacgtcttgaccggcctgatcaacatgaccgtgccgacgctgcatgttgggccgctagcggctatgagcatcttgatcgcgtacagtgcagcaatcacgggcactgctcttggcctagatgcctacggtatttccatcaaattgtag

SEQ ID NO: 302 - protein, 502 aa, Colletotrichum graminicola
MSDATAASYKKLKEDFVSNLSGGSASEINYVTAVAPVAVLLWSVLQSRQSFFKPYTVLGAVLDYLLNVTAILLSTTLYASSPLLLSALLLAPAALTYAFPPNLGASRKKPAIPPNAKSKAAAAGTPKASPSALPLKPFLTHYRGSMLVVTCIAILAVDFRLFPRRFAKVETWGTSLMDMGVGSFVYSAGLVAARPVVKERAEGRSTPLTTRLLQSMRHSLPLLVLGVIRLLSVKGLDYAEHVSEYGVHWNFFFTLGFLPPFVAIFQSALKIVPSYAALAIILSVLYQVALESTDLKAYILTAPRVDLLSKNREGIFSFFGYLAIFLAGQDTGMYVLPRSINPKSDGTPSTQRKTLLLTMAVWSAVWASLFFLTTSYSYGDGLSVSRRLANLPYVLWTAAFNSTQLLAYAVVDTLFFPSSYNAADAKAEREAYETATSRVLRAYNRNGLFLFLVANVLTGLINMTVPTLHVGPLAAMSILIAYSAAITGTALGLDAYGISIKL

SEQ ID NO: 303 - DNA, 1503 bp, Colletotrichum higginsianum
atgcccgacactactgccgcgagctacaagaagctcaaggaggactttgtctcgaacctctccggcggctccgcctccgagatcaactatgtgaccgcagtcgctcccatcgccgtcctgctatggtctgtcctccagtcccgccaatccttcttcaagccatacacggtgctgggagccgccgttgactacctcctcaacgtcaccgccatcctcctctcgacgactctctacgcttcctcccccctgctcttgagcgcactgctcctcgcccccgccgccctgatttacgcctttcctcccaacctcggtgcccctcgcaggaaacccgtcatacctcccagcaatctgaagtccaaggccggggccgccaccgtgccgctccccgtattgcccgtcaagccgttcctgacgcactatcgcggcaccatgttggtcgtcacctgcgttgccatcctcgccgtcgacttccgcctcttccctcgccgcttcgccaaagtcgagacatgggggacttcactgatggacataggcgttggctccttcgtatacagtgccggtgtcgtcgctgcccggcctgtcttgaaggagcgcgccgagggcaaatcgacacccttgacgacgcgcctactgcggtccatgcgtcattccttaccgctacttgtcctgggtgtcgtccgcctgctcagcgtcaagggcttagactacgccgaacatgtgtccgagtacggtgtacactggaacttcttcttcacactgggcttgctaccgccttttgtagccatcttccagtccgctctcaagatcgtccctagctacgccgctctcgccatcattctcagcgtgctgtatcaagtcgcccttgagagcacggacctaaaggcctacattctgaccgctccaagaatagacctgctttccaagaaccgagagggcatcttcagcttcttcggctacttagccatcttcctcgctggccaggacaccggcatgtacgtcttgccccgcagtatcaacaccaagagtgacagtactccttcctcccagcgcaagacgctccttctgacgatggcgatatggtctgccgtctgggcggggcttttcttccttaccacgagctacagctacggcgacggtctcagtgtttcgcgtcgcctagccaatctgccctacgttttatggaccgctgcctttaactcgacgcaactcctggcttacgccatggttgataccatcttcttcccgtcgtcctacagcgcaaccgacgcgaagtcggagaaggatgcctacgagactgccacaagtagggttctccgcgcctacaaccgcaacggcctgtttctgttcctgttggccaacgttctgactggcctggtcaatatgacggtacccacgctacacgttgggccgctggcgacgatgagcatcttgatcgcgtacagtggaaccgtcacgggcatcgccctgggcctggacgcgtacaacatctccatcaagttgtag

SEQ ID NO: 304 - protein, 500 aa, Colletotrichum higginsianum
MPDTTAASYKKLKEDFVSNLSGGSASEINYVTAVAPIAVLLWSVLQSRQSFFKPYTVLGAAVDYLLNVTAILLSTTLYASSPLLLSALLLAPAALIYAFPPNLGAPRRKPVIPPSNLKSKAGAATVPLPVLPVKPFLTHYRGTMLVVTCVAILAVDFRLFPRRFAKVETWGTSLMDIGVGSFVYSAGVVAARPVLKERAEGKSTPLTTRLLRSMRHSLPLLVLGVVRLLSVKGLDYAEHVSEYGVHWNFFFTLGLLPPFVAIFQSALKIVPSYAALAIILSVLYQVALESTDLKAYILTAPRIDLLSKNREGIFSFFGYLAIFLAGQDTGMYVLPRSINTKSDSTPSSQRKTLLLTMAIWSAVWAGLFFLTTSYSYGDGLSVSRRLANLPYVLWTAAFNSTQLLAYAMVDTIFFPSSYSATDAKSEKDAYETATSRVLRAYNRNGLFLFLLANVLTGLVNMTVPTLHVGPLATMSILIAYSGTVTGIALGLDAYNISIKL

SEQ ID NO: 305 - DNA, 1548 bp, Gaeumannomyces graminis
  misc_feature: Gaeumannomyces graminis var. tritici
atgtccaactcgagctcgtccgcgagctacaagcaccagaaggaggcattcgtctcgggtcacagcggcgggtctgtcgccgagatttgctccgtgataggtgttgcgccagtcgccatcaccctctggtccgtcttgcaggcgcgccagtccttcttccagccctacacccctctcgccttcgccgtcgactttcttctcaacgtgtgcgccgtgcttctggccaccacgctctactccgacacctcgctcctcctgagcctgctgctggccgccccggcccttgtcatctttgcgctcccgcctagcccttcctcctctccctcctcgtccttctcctcccgcccccggaagaggcccaaggtgccgcccaatgccgagtccagaaaggccgcggcccaagggggcgccgacgcgctgcccttcaaggccttcctgaccaactaccgcggcagcatgatggtggccacctgcctggccatcctggccgtcgacttccgcctcttccccaggcgcttcgcaaaggtcgagacctggggcacctcgctgatggatatgggcgtgggctcctttgtctactcgggcggtctcgtcgccgcccgccccgtgctcaaggagcagctcgccggcggcggccgcggcggcagccgcaccactaccaccaccccgctcgcccagcgcatgctctggtccgtgcgccactcgctgccactcttcgccctcggcgtcgtgcgcctgctcagcgtcaagggcctggactacgccgagcacgtgaccgagtacggcgtgcactggaacttcttctttaccctcggcctgctgccgccctcggtggccgccgcccagtcggccctgcgcctggtgccgtcctttgcggggctggcgctgctgctggccgtcgtctaccaggtgctgctggagagcacggatctcaaggccttcatcctggccgccccgcgcaccgatctcatctcgatgaaccgcgagggaatctttagcttcctcggctacctggccatcttcctggccggcatggacgccggcatcaaggtgctcccgcgcagccccggccgccggcccctgctggtcaagctggtctccagcacggtcttctggtccgccttgtacatgtttgccacgagctacagctggggcgcgtccctgtcggtgtcgcggcgcatggcgaacctgccgtacgtgctgtgggtggcgtggttcaactcggccaccatcctggccttttacctggccgagagcctcttcttcaccccgcgcgcaggcagcacaggtgcggcggcggcggcggtggacccgagggtcgagaaggagacttacatggccgccagcagccgcgtgctgcgggccatcaaccgcaacggcctcgccgtcttcctcgtcgcgaacttgctgacgggcctggtcaacatgacggtgccgacgctggatgttgggccggcggctacgatggggatactggtgggctatgccgccacgtttacgggggtcgcggtgggcctggacatgtacaacatatcgatcaagctctag

SEQ ID NO: 306 - protein, 515 aa, Gaeumannomyces graminis
MSNSSSSASYKHQKEAFVSGHSGGSVAEICSVIGVAPVAITLWSVLQARQSFFQPYTPLAFAVDFLLNVCAVLLATTLYSDTSLLLSLLLAAPALVIFALPPSPSSSPSSSFSSRPRKRPKVPPNAESRKAAAQGGADALPFKAFLTNYRGSMMVATCLAILAVDFRLFPRRFAKVETWGTSLMDMGVGSFVYSGGLVAARPVLKEQLAGGGRGGSRTTTTTPLAQRMLWSVRHSLPLFALGVVRLLSVKGLDYAEHVTEYGVHWNFFFTLGLLPPSVAAAQSALRLVPSFAGLALLLAVVYQVLLESTDLKAFILAAPRTDLISMNREGIFSFLGYLAIFLAGMDAGIKVLPRSPGRRPLLVKLVSSTVFWSALYMFATSYSWGASLSVSRRMANLPYVLWVAWFNSATILAFYLAESLFFTPRAGSTGAAAAAVDPRVEKETYMAASSRVLRAINRNGLAVFLVANLLTGLVNMTVPTLDVGPAATMGILVGYAATFTGVAVGLDMYNISIKL

SEQ ID NO: 307 - DNA, 1506 bp, Fusarium graminearum
atgcctgatactgccagctacaagcagcaaaaggaggacttcgtgtccaacctttccggtggctctgtcgcagaaatcaactatgtcacatccgttgcagctgtagctattctactttggtccgtcctccaagcccgccagtccttctttgaaccatacacagcgttggctttcgccgtcgacttcctcctcaatgttggcgcaatcctcctctcagtgaccctctactccaactcgccacttctgctcaaccttctcctaattgcccccgccatcctcgtctttactctaccaccccgttctagaagtccaaaaaagaaggccaagatacctcccaatgcccggtccaacgagagctctgggcagctggatatcctttcaacaaagccattcctcacaaacttccgtggctgcatgttgattgtcacctgcgtggctatccttgctgtcgatttccgcctatttcccagacgctttgccaaggttgagacatggggtacgtctctcatggaccttggtgttggatccttcgtcttttcagctggccttgtcgcagctcgtcccgtgttgcgagagaaggcgacaggtcgcgctggcgctgtaggcaacgctttatcactttcctcacgtctcgtacaatcgttgcgccattctattccactcctggtcctgggcttcatacggttcctgagtgtgaagggtctggattacgcagaacatgtgacagaatacggcgtccattggaacttttttttcacactgggattcttgcccccttttgtggctatctttcaatcagtgcgcaaattaattccttcatttgcggcgctgtcgttgttggtgggcgtcacatatcaggtcctacttgaaaccactagtctgaaggcgtatgtccttacagcgcccaggaccgatctgattagcatgaaccgtgaagggattttcagcttcgtcggttacttggccatctttcttgccggacaggatacgggcatgtttgtcattccccgtaacctcgtccccaagagtactgctagtcctggagctcaacggaacaagcttctgaagatcacggccgtatggggcggagtctggacaggtctctatgtgttgtctaccaactaccattatggtttcggattagcagtgtctcgtcgcatggctaacctaccctacgtcttgtgggttgtcgccttcaacaccatacaactccttgggtttgctgttatcgacacaatctttttccctgcattctacaatgcccaggatgcgaaaacggagaaggaggcatacacacacgccaccagtcgggtgatgcgagcgtacaatcgcaacggtctggctgtattcttgttggcaaacttgttgactgggttggtcaacatgactgtcaacacacttgatgctactcccatcgctacgatgggcattctcgtcgtatatagcgcggcactgactggtgttgctgtagcattggatgcttataacatcagtatcaagctttga

SEQ ID NO: 308 - protein, 501 aa, Fusarium graminearum
MPDTASYKQQKEDFVSNLSGGSVAEINYVTSVAAVAILLWSVLQARQSFFEPYTALAFAVDFLLNVGAILLSVTLYSNSPLLLNLLLIAPAILVFTLPPRSRSPKKKAKIPPNARSNESSGQLDILSTKPFLTNFRGCMLIVTCVAILAVDFRLFPRRFAKVETWGTSLMDLGVGSFVFSAGLVAARPVLREKATGRAGAVGNALSLSSRLVQSLRHSIPLLVLGFIRFLSVKGLDYAEHVTEYGVHWNFFFTLGFLPPFVAIFQSVRKLIPSFAALSLLVGVTYQVLLETTSLKAYVLTAPRTDLISMNREGIFSFVGYLAIFLAGQDTGMFVIPRNLVPKSTASPGAQRNKLLKITAVWGGVWTGLYVLSTNYHYGFGLAVSRRMANLPYVLWVVAFNTIQLLGFAVIDTIFFPAFYNAQDAKTEKEAYTHATSRVMRAYNRNGLAVFLLANLLTGLVNMTVNTLDATPIATMGILVVYSAALTGVAVALDAYNISIKL

SEQ ID NO: 309 - DNA, 1506 bp, Fusarium pseudograminearum
atgcctgatactgccagctacaagcagcaaaaggaggacttcgtgtccaacctttctggtggctctgtcgcagaaatcaactatgttacatccgttgcagctgtagctattctactttggtccgtcctccaagcccgccagtcattctttgaaccatacacggcgttggctttcgccgtcgacttcctcctcaatgttggcgcaatcctcctctcggtgaccctctactccaactcgccacttctgctcaaccttctcctaattgcccccgccatcctcgtctttactctaccaccccgttctagaagtccaaagaagaaggccaagatacctcccaatgcccggtccaacgagagctctgcgcagctggatatcctttcaacaaagccattcctcacaaacttccgtggctgcatgttgattgtcacctgtgtggctatccttgctgtcgatttccgcctatttcccagacgctttgccaaggttgagacatggggtacgtctctcatggaccttggtgttggatcctttgtcttttcagctggccttgtcgcagctcgtcccgtattgcgagagaaagcgacaggtcgcgctggcgctgtaggcaacgcttcatcactttcctcacgtctcatacagtcgttgcgccattccattccactcctggtcctgggcttcatacggttcctgagtgttaagggcctggattacgcagaacatgtgacagaatacggcgtccattggaacttttttttcacactgggattcttgcccccttttgtggctatcttccaatcagtgcgcaaattaattccttcatttgcggcgctgtcgttgttggtgggtgtcacatatcaggtcctgcttgaaaccactagtctgaaggcgtacgtcctcacggcgcccaggaccgatctaattagcatgaaccgtgaagggattttcagcttcatcggctacttggccatcttccttgccggacaggatacgggcatgtttgtcattcctcgtaatcttgtccccaagagtactgctggtcctggagctcaacggaacaagcttctgaagatcacggccgtatggggtggagtctggacaggtctctatgtgttgtccaccaactaccattatggttttggattagccgtgtctcgtcgcatggcaaacctaccctacgtcttgtgggttgtcgccttcaacaccgtacaactccttgggtttgctgttatcgacacgatcttcttccctacattctacaatgcgcaggatgcgaaaacggagaaggaggcatatacacacgccaccagtcgggtgatgcgagcgtacaatcgcaacggtctggctgtatttttgttggcaaacttgttgactgggttggtcaacatgactgtcaacacacttgatgctactcccatcgctacgatgggcattctcgtcgcatatagcgcgacactgactggtgttgctgtggcattggatgtttataacatcagcatcaagctttaa

SEQ ID NO: 310 - protein, 501 aa, Fusarium pseudograminearum
MPDTASYKQQKEDFVSNLSGGSVAEINYVTSVAAVAILLWSVLQARQSFFEPYTALAFAVDFLLNVGAILLSVTLYSNSPLLLNLLLIAPAILVFTLPPRSRSPKKKAKIPPNARSNESSAQLDILSTKPFLTNFRGCMLIVTCVAILAVDFRLFPRRFAKVETWGTSLMDLGVGSFVFSAGLVAARPVLREKATGRAGAVGNASSLSSRLIQSLRHSIPLLVLGFIRFLSVKGLDYAEHVTEYGVHWNFFFTLGFLPPFVAIFQSVRKLIPSFAALSLLVGVTYQVLLETTSLKAYVLTAPRTDLISMNREGIFSFIGYLAIFLAGQDTGMFVIPRNLVPKSTAGPGAQRNKLLKITAVWGGVWTGLYVLSTNYHYGFGLAVSRRMANLPYVLWVVAFNTVQLLGFAVIDTIFFPTFYNAQDAKTEKEAYTHATSRVMRAYNRNGLAVFLLANLLTGLVNMTVNTLDATPIATMGILVAYSATLTGVAVALDVYNISIKL

SEQ ID NO: 311 - DNA, 1500 bp, Fusarium oxysporum
atgtctgaatccgggagctacaagcaacgaaaggaggactttgtgtccaatctctctggcggctctgtcgcagaaatcaattatgttacatccgttgcggctgtagcgattattctgtggtccgtcctccaagcccgccagtccttcttcgaaccatataccgtactcgcattcgctgttgatttcctcctcaacgttggagccattctcctgtcaataactctctattcaaaatcaccgcttcttctgaaccttcttcttattgcgcctgcgattctcatcttcgtcctcccacctaactctacaagtcgaaagaagaagctcaaggtccctccaaatgcgcggtccaaggaaaactccgggcagcttgatatcttatcaacgaagcctttcctcacaaactttcgcggttgcatgatgattgtcacctgtgtggccattcttgctgtcgacttccgcttgtttcctagacggtttgccaaggttgagacatggggtacttctctgatggacttaggtgttggatcctttgtcttctcagccggccttgttgcggctcgtcctgtactgcgcgagaaagcgataggtcgcacaacaggccgggcaacacccctttcccaccggatcgtgcattcgctgcgccattctatcccactactagtgctagggttaatacgtttcctgagtgttaagggtttggactacgccgaacatgtgacagaatatggcgttcactggaacttcttcttcacccttggttttctgcccccatttgttgccatcttccagtcagctctgaaatggattccttcatttgcagccctgtcgttgttggtgggcgtcacatatcaaattctgcttgaaaccactagtctcaaggcgtatgtcctgacggcgcccaggaccgacttaatcagcatgaaccgggaaggtattttcagcttcattggatacctggcaattttccttgctgggcaagatactggcatgtttgtcattccccgtaacatcccccctaagagtaccgccagccctggagcccagaggaacacccttctgatgaccatggctgtttggggtggtgtctggactggactctacttgctctccacgaattatcactacggtttcggcttggcagtatcccgtcgcatggcaaacctaccctatgttttatgggttgttgccttcaacaccttgcaattgttgggttttgcggtcatcgatacgatattcttccctaccttctataatgcacaagacgcaaagacggagaaggaggcttatatacaagccaccagccgtgtaatccgagcatacaatcgtaacggattggccatcttcttgttggcaaacttgttgactggcttggtcaatatgacagtcaacacactggatgctactcccgtactgacaatgggaatattggttgcatataccgcaacgatcacaggggtcgcggtggcattagatgcttataatatcagcattaagctttaa

SEQ ID NO: 312 - protein, 530 aa, Fusarium oxysporum
MKIYCLHRFFVPEPLHSPKLCAEACHHLPPAMSESGSYKQRKEDFVSNLSGGSVAEINYVTSVAAVAIILWSVLQARQSFFEPYTVLAFAVDFLLNVGAILLSITLYSKSPLLLNLLLIAPAILIFVLPPNSTSRKKKLKVPPNARSKENSGQLDILSTKPFLTNFRGCMMIVTCVAILAVDFRLFPRRFAKVETWGTSLMDLGVGSFVFSAGLVAARPVLREKAIGRTTGRATPLSHRIVHSLRHSIPLLVLGFIRFLSVKGLDYAEHVTEYGVHWNFFFTLGFLPPFVAIFQSALKWIPSFAALSLLVGVTYQILLETTSLKAYVLTAPRTDLISMNREGIFSFIGYLAIFLAGQDTGMFVIPRNIPPKSTASPGAQRNTLLMTMAVWGGVWTGLYLLSTNYHYGFGLAVSRRMANLPYVLWVVAFNTLQLLGFAVIDTIFFPTFYNAQDAKTEKEAYMQATSRVIRAYNRNGLAIFLLANLLTGLVNMTVNTLDATPVLTMGILVAYTATITGVAVALDAYNISIKL

SEQ ID NO: 313 - DNA, 1644 bp, Fusarium verticillioides
atgttacaacgtggtaacttcaaggctgactttaacattccttgtcaacttttacagatctactgcctccaccgtttctttgtgcccgaacctctacactctcctaaattatgcgctgaggcttgccgtcatttgctgctggccatgtctgaacccgggagctacaagcaacgaaaggaggactttgtgtccaatctctccggcggctctgtcgcagaaatcaattatgttacatccgttgcggctgtagcaattattctatggtccgtcctccaagcccgccagtccttcttcgaaccgtatacggtactcgcattcgctgttgatttcctcctcaacgttggagccattctcctgtcgataactctctattcgaaatcaccgcttcttctgaaccttcttctcattacgcccgcggttttcatcttcgtcctcccacctcaatctgcagatcgaaagaagaagctcaaggtccctccaaatgcgcggtccaaggaaaactccgggcagcttgatgtcttatcaacaaagcctttcctcacaaactttcgcggttgcatgatgattgtcacctgtgtggccattcttgctgtcgactttcgcttgtttcctagacggtttgccaaggttgagacatggggtacttctctgatggacttaggtgttggatcctttgtcttctcagcgggccttgttgcagctcgtcctgtactgcgcgagaaagcgataggtcgcacaacaggccgggcaacacccctttcccaccggatcgtgcattcgctgcgccattctattccactgctagtgttagggttgatacgtttcctgagtgttaagggcttggactacgccgaacatgtgacagaatatggcgttcactggaacttcttcttcacgcttgggtttctgcccccttttgttgccatcttccagtcagctctgaaatggattccttcatttgcagccctgtcgttgttggtgggcgtcacatatcaaattctgcttgaagccactagtctgaaggcgtatgtcttgacggcgcccaggaccgacctaatcagcatgaaccgggaaggcattttcagcttcattggatacctggcaattttccttgctgggcaagatacgggcatgtttgtcattccccgtaacatccctcctaagagtaccgccagccccggagctcagaggaacacccttctgatgactatggctgtttggggtggtgtctggactggactctatttgctctccacgaattaccactatggtttcggtttggcagtatcccgtcgcatggcaaatttaccctatgttttgtgggttgttgccttcaacaccttgcaattgttgggttttgcggccattgacacgatattcttccctaccttctataatgcacaagacgcaaagacagagaaggaggcttatatgcaagccaccagccgtgtaatccgagcatacaaccgtaacggattggccatcttcttgttggcaaacttgttgactggcttggtcaatatgacagtcaatacgctggatgctactcccgtactgacaatgggaatattagttgcatataccgcaactatcacaggggtcgcagtggcattagatgcttataatatcagctttaagctttaa

SEQ ID NO: 314 - protein, 547 aa, Fusarium verticillioides
MLQRGNFKADFNIPCQLLQIYCLHRFFVPEPLHSPKLCAEACRHLLLAMSEPGSYKQRKEDFVSNLSGGSVAEINYVTSVAAVAIILWSVLQARQSFFEPYTVLAFAVDFLLNVGAILLSITLYSKSPLLLNLLLITPAVFIFVLPPQSADRKKKLKVPPNARSKENSGQLDVLSTKPFLTNFRGCMMIVTCVAILAVDFRLFPRRFAKVETWGTSLMDLGVGSFVFSAGLVAARPVLREKAIGRTTGRATPLSHRIVHSLRHSIPLLVLGLIRFLSVKGLDYAEHVTEYGVHWNFFFTLGFLPPFVAIFQSALKWIPSFAALSLLVGVTYQILLEATSLKAYVLTAPRTDLISMNREGIFSFIGYLAIFLAGQDTGMFVIPRNIPPKSTASPGAQRNTLLMTMAVWGGVWTGLYLLSTNYHYGFGLAVSRRMANLPYVLWVVAFNTLQLLGFAAIDTIFFPTFYNAQDAKTEKEAYMQATSRVIRAYNRNGLAIFLLANLLTGLVNMTVNTLDATPVLTMGILVAYTATITGVAVALDAYNISFKL

SEQ ID NO: 315 - DNA, 1506 bp, Leptosphaeria maculans
atggcgaaatcatacaaacaactcaaagaagcctgggtgtccggccacaccggcagctcagtcgctgatgtgaacagcgtatcgctcgcaatgcctttgagcatcctattatggtccgttatacagtcccgcatgcgattattcacgccatacacgctgccagccttctttgtggatttgctgctcaattgcggcgtcacgctatttgcgaccacgatatactcgtcctcgccatgggtgttgaatatgctgttgttgcttcccgcaaccgtcctatatgtgcttgagaaaccgatgcctgtaaaacgggaggcgcctcggccgcctttgaaaaaggagacgcgggaggagaaggatgccgagctcgatccacttcctgtcaaaccgtttattacaaactaccgcggcgctatgatggtcatcacatgtattgctatactggctgtcgactttcgagtgttccctcgtcgcttcgcaaaggtggagaattgggggacgtcgctcatggacatgggcgtaggctcattcgttttcacagctggcgtagtctcgattcgccccgccttgaaagaagccccaggtcaacgcgcaccgctctccaaacgcttcaccgcatcaatccgccacgcgattcccctcctcgttcttggcgtcatccgcctcatctctgtcaaggggctagactatgcagaacacgttacggaatacggggtgcattggaacttcttcttcacacttgccttcctcccccccttcgccaccctctgccaaaccctcttcgacctcgtcccctcatacgccctcctctccttcgccctagcctccgtctacgaaatcgccctcgacacaactcccctctcctccttcatcctcatctccccacgcaccaacctcctcacacaaaaccgcgagggaatcttctccttcatcggctacctctctatcttcctcgccggccaatccctcggctccatcgcgctcccccgccaaccaaaacccaaacccgtacccaaccccccgtccccaacctccccactccaccacctcacccgctccaccctcggccaactctgcctcgtcagcatcgcatggacatgcctcttctacctctgcacttcctaccacggcctccacctcaccgtctcccgccgcctcgctaacctcccctacgtcgtctgggtcgcctccttcaacagcgccaacatcgccctctgctgcgccatcgaatccctcctctttcccaatctataccacgcgaaagccggcagtcgcgccgaggagcgccgccgcgccagggacgccacgagtaccgtcttgcacgcgtataaccgcaatggccttgttgtgttcttggtcgccaacctgctgaccgggctggtgaatttggggctgccgacgttggagatgggggttgggcagagtatggtggtgttggcggcgtatgcggtggcggttacgggggtggcggttgggctggattgctgggatgttacgattaagctgtga

SEQ ID NO: 316 - protein, 501 aa, Leptosphaeria maculans
MAKSYKQLKEAWVSGHTGSSVADVNSVSLAMPLSILLWSVIQSRMRLFTPYTLPAFFVDLLLNCGVTLFATTIYSSSPWVLNMLLLLPATVLYVLEKPMPVKREAPRPPLKKETREEKDAELDPLPVKPFITNYRGAMMVITCIAILAVDFRVFPRRFAKVENWGTSLMDMGVGSFVFTAGVVSIRPALKEAPGQRAPLSKRFTASIRHAIPLLVLGVIRLISVKGLDYAEHVTEYGVHWNFFFTLAFLPPFATLCQTLFDLVPSYALLSFALASVYEIALDTTPLSSFILISPRTNLLTQNREGIFSFIGYLSIFLAGQSLGSIALPRQPKPKPVPNPPSPTSPLHHLTRSTLGQLCLVSIAWTCLFYLCTSYHGLHLTVSRRLANLPYVVWVASFNSANIALCCAIESLLFPNLYHAKAGSRAEERRRARDATSTVLHAYNRNGLVVFLVANLLTGLVNLGLPTLEMGVGQSMVVLAAYAVAVTGVAVGLDCWDVTIKL

SEQ ID NO: 317 - DNA, 1497 bp, Magnaporthe oryzae
atgtcgaatttgacagctagctacaagcagcaaaaagaggctttcgtctcgggacacaatggcggctctgttgccgagatacttgccgtcacaggcgttgctccggttgccctcgtgctctggtccgtcctgcagacgcgccagtcatttttcgacccatatactcccatagcttttactgttgacttactcctcaacataatcgctgtgctgctagcaacaactctatatgcacatgcaccggttcttctcatattattactcgccgccccggccgtgcttctatatggcatccccgcggcaaatgcctccaggcgccggcccaagaagcctaagcccgccgaggcgcagaagcaggcagatgtgctctcactaaagccctttctgacaaattatcgcggcagcatgctcgccctgacatgcctagcaattctagcggttgatttccccatcttcccccgtcgcttcgccaaggtcgagacatggggcacgtctctgatggatataggcgtgggctctttcgtctattcaggaggtcttgtttcggctcgtccagttttgcgggaggttgccagcggcaaatcaacaccgcttgcgcagaaactgatatacagccttcgccactcgtttccgcttttggttctcggtgtgatccggctactgtccgtcaagggactggactatgcagagcacgtcactgagtatggcgtgcactggaactttttcttcactttgggatttcttccgcctttcgtggccattctgcagcctttcctgcgcataataccttcatacgccgtcctctgcattctcctaggcgtcgtctaccaagtactgcttgaaagtacccgactcaaagccttcatcctgatcgccccgcgtacggacctgatatccatgaacagggagggcatcttcagcttcttggggtacctggcaatcttctttgccggcatggatgccggcacctacgttctccctcggacgctaggcagcgagcccacaggtccctcgagtgcgcggaagaagctgctcgtgaggatgggcttgcggacagcgctctggaccgcgctctacgtcttcacaacaaatttcacctatggccagggtctggatgtgtcccgccgcatggcgaatttgccgtacgtgttgtggaccgcttggtacaactcggcactgctgatggcgttttgcgtcgtcgaggcacttttcttcccccctacagcctgctacgggaacagcagcgtcaacgtctcggacgggagggctgagaaggaggcgcataatgccgccacgagccgcgtactgcgtgctttcaacaagaacgggctggccgtcttcttgttggcaaacctgctgactggagccgttaacatgactcttcctacgttgaccgccggtcccctgcttgcgatgggaatcttggtggggtatgctgtggtcgtcacgggggttgcagtgatcttggatgcttataatatctcgatcaagctgtag

SEQ ID NO: 318 - protein, 498 aa, Magnaporthe oryzae
MSNLTASYKQQKEAFVSGHNGGSVAEILAVTGVAPVALVLWSVLQTRQSFFDPYTPIAFTVDLLLNIIAVLLATTLYAHAPVLLILLLAAPAVLLYGIPAANASRRRPKKPKPAEAQKQADVLSLKPFLTNYRGSMLALTCLAILAVDFPIFPRRFAKVETWGTSLMDIGVGSFVYSGGLVSARPVLREVASGKSTPLAQKLIYSLRHSFPLLVLGVIRLLSVKGLDYAEHVTEYGVHWNFFFTLGFLPPFVAILQPFLRIIPSYAVLCILLGVVYQVLLESTRLKAFILIAPRTDLISMNREGIFSFLGYLAIFFAGMDAGTYVLPRTLGSEPTGPSSARKKLLVRMGLRTALWTALYVFTTNFTYGQGLDVSRRMANLPYVLWTAWYNSALLMAFCVVEALFFPPTACYGNSSVNVSDGRAEKEAHNAATSRVLRAFNKNGLAVFLLANLLTGAVNMTLPTLTAGPLLAMGILVGYAVVVTGVAVILDAYNISIKL

SEQ ID NO: 319 - DNA, 1557 bp, Melampsora larici-populina
atggaatataaatcgactaaagaaaatttcgtatcgggtggtcaaggttgttctatgctcgatgttttagcaatagccattaccgctttgtttacttacttcatttggtctttggtcaacggccgtctcacatctcgacaaactcctcaattgactatcctgcttaccgagttctttatgcttaccacgcccctcttactggctatcaccatcttttctgactatctgtggaccttcaatgtcgccctcgcccttctctcttggtcggtctcgttcgcccccatccgttcaccagtcggtctacctcagtcccgtcccaaggcctcttctgctgcctacgatgctcgaaaggccaagtcatcaactccaccatccaccccaagtgcttcagactatactcacaaggatcttaatttcaatcagtcacaacatctctcagaaactcttctgcatcatcgccatcctctcaagccatctgaatcttcaaagacagatgacactgtaaatctcatgtcttcgaaaaaaccagagataaaatttcaccaagaatttgtgaccctataccgagcccaaatgatgttgcttaccgtcctgtcaatcctagccgtcgattttccagtctttcctagaaaatttggtaagactgaacacactggggtttctcttatggatctcggtgtcggttcctttgttttttcacttggaatcgtcggtgcgcttccagtgcttaaaggcacccctactcagcagtcattttgggtagaagtttggaacggtgtccgtaaaacggtgccgctcgtcttgctcggattaatcaggacaatattagtgaaaggagtggactacccagaacatgtaaccgaatatggtgttcattggaatttctttttcacacttgctatactcccaatggtaggtgtggccgctcatagactcatggcaatcagccgtcttggtttcgcatctcttggcttactcttgggtatatttcatcaattgatgttaagttatgctggtgtggaaaactacgtgctctcagacgcgccccgtcatggattgatctcagctaaccgcgaaggaatttccagtcttgccgggtatggggtcatataccttcttggtcttgacagcggctgctatgtcctcccaccccatcctgattacctcaagaaaggtcgaactgagactcgggcaggcaaacgggccacagtcttggccagctggggtatcgtttggtggacgcttgttttcttacttggacgaccttgtcgaaggacggccaacggtgcgtattgtgcatgggtagctgccatgaatgttttcttgttgcttgggtacgaactcctcggaggttcgctacccaaaacgtacgaggcggtaaatagaaatagtctagcagtattcttaggtgccaatcttttgacaggactggtgaatgtttcgatagagacggtctttgtgacggatgctcgaatctcgctacttctcttggaagcttacctggctgttgttatcatggtcgcgtggcttgctcgtgaatacaaattgaaaatatga

SEQ ID NO: 320 - protein, 518 aa, Melampsora larici-populina
MEYKSTKENFVSGGQGCSMLDVLAIAITALFTYFIWSLVNGRLTSRQTPQLTILLTEFFMLTTPLLLAITIFSDYLWTFNVALALLSWSVSFAPIRSPVGLPQSRPKASSAAYDARKAKSSTPPSTPSASDYTHKDLNFNQSQHLSETLLHHRHPLKPSESSKTDDTVNLMSSKKPEIKFHQEFVTLYRAQMMLLTVLSILAVDFPVFPRKFGKTEHTGVSLMDLGVGSFVFSLGIVGALPVLKGTPTQQSFWVEVWNGVRKTVPLVLLGLIRTILVKGVDYPEHVTEYGVHWNFFFTLAILPMVGVAAHRLMAISRLGFASLGLLLGIFHQLMLSYAGVENYVLSDAPRHGLISANREGISSLAGYGVIYLLGLDSGCYVLPPHPDYLKKGRTETRAGKRATVLASWGIVWWTLVFLLGRPCRRTANGAYCAWVAAMNVFLLLGYELLGGSLPKTYEAVNRNSLAVFLGANLLTGLVNVSIETVFVTDARISLLLLEAYLAVVIMVAWLAREYKLKI

SEQ ID NO: 321 - DNA, 1494 bp, Mycosphaerella fijiensis
atgacgcccgaatacaaggcgcaaaaggaagccgctgtctcttttctcgggggaggtggcatttgggaaatcaatcatgttgctttggtagctccagccgccgcctttttgtgggcaaccttacagacccgccaacacttcttcaaaccctacaccatccccgcggcgctcaccgattttctgataaattgctgtgccatcctcttcgccacgaccgtctattccggtgggccacacattcttatcggcttactcgtccttccagccgtgcccgctttcctccagcccagtcttgaacttcccaaggcggcaaagcctcctggcaaggccgatgaagacctggcaaaagaggaagagaaagatcctctgccagtcaaaccattcatcacagcgtatagaggtgccatgatgattatcacttgctctagcatcttagctgtcgactttcctgtctttccacgacgattcgcaaagacagaatcgtttggaacctcacttatggatctgggagtgggctctttcgtgttcgctgctggcatcgttgcagcccgccaacaactgaaggagcagataagcgccacccgatcgatccttaccagactgaaggaagccatgcgacattcgcttccactcctcgtcctcggcttgcttcgcctggccagtgtcaaaggacttgaatacgcagagcatgtcagcgagtatggtgtgcattggaacttcttcttcacactcgcgctcttgtctcccgctttggcaatactacagccgcttctgcaatggctaccgtacaacatctttgctttcatcttagccatttgctacgagctgatcctgttctgtgttcctgacatgaagaggtacatcattctctccgaaagagtgcctggcgactggctttcgcagaatagagaaggtgtcttctctttcatcggctatctcgccattttcatcgccggaatgggcattggccagaatatcttgactcgcgatcctcctccgggtggaaacccccttgcgcctaaagatcacatggatcaggatgcggagtgcactcttccacgacttgccatttggacactcttatggttcgtgttcgctttatgggcaatgtggaggtatggcccacgactgttcgtctcgcgacgaatggcgaacttggcatacgtttgctgggtgtgttccttcaacacagctcaattgttgctgttttgcctaatcgagaaattcttgttcccgaccctttacaacgccaagaccaaggaaggcgaacgccaacgcatacaagaagccacaagcagagttatgaaggcgtacaaccgtaatgggctcgctgtattcttgattgcgaacttgctgaccggactcgtcaacatgaccatgccaaccattttcatggcggacgtcccggcgatggccgtcttggttagctacatggcggtcttgacagccattgcgcttgctttagaccattacaacatctcgatcaagctttag

SEQ ID NO: 322 - protein, 497 aa, Mycosphaerella fijiensis
MTPEYKAQKEAAVSFLGGGGIWEINHVALVAPAAAFLWATLQTRQHFFKPYTIPAALTDFLINCCAILFATTVYSGGPHILIGLLVLPAVPAFLQPSLELPKAAKPPGKADEDLAKEEEKDPLPVKPFITAYRGAMMIITCSSILAVDFPVFPRRFAKTESFGTSLMDLGVGSFVFAAGIVAARQQLKEQISATRSILTRLKEAMRHSLPLLVLGLLRLASVKGLEYAEHVSEYGVHWNFFFTLALLSPALAILQPLLQWLPYNIFAFILAICYELILFCVPDMKRYIILSERVPGDWLSQNREGVFSFIGYLAIFIAGMGIGQNILTRDPPPGGNPLAPKDHMDQDAECTLPRLAIWTLLWFVFALWAMWRYGPRLFVSRRMANLAYVCWVCSFNTAQLLLFCLIEKFLFPTLYNAKTKEGERQRIQEATSRVMKAYNRNGLAVFLIANLLTGLVNMTMPTIFMADVPAMAVLVSYMAVLTAIALALDHYNISIKL

SEQ ID NO: 323 - DNA, 1629 bp, Mycosphaerella pini
atgactccggaatataaggcagaaaaggaggcttccgtctcatggctgggagggggtggcatgtgggaaataaaccatgtcgccttggtcgctcctgcggccgccttcctctgggctatgctacagtcgaggcaactcttcttcaagccatacacgtctgcagccgctttcacagattttttgattcagtgttgcgctatcctgttcgctaccaccgtctactcgggagcaccacaaattctgaatggtttactcattctgccggcattggcagcctacctgcagcccagtacggaagctcagaaggccgcgcagaagacagcacagacctctaagaagcctggagtcgactccgctgatacccataaagacgaaaaagacgatctagatcccctgccggtcaagccatttgttaccatgtaccgaggagcaatgatgatcgtcacatgtgcttgcattctggctgtcgactttcctgcagtcttcccacgacgcttcgccaagacggagtcctttggaacgtctttgatggatatgggagtgggttccttcgtctttgctgctggtgtcatttcggctcggcctcagctcaaggaaaatcacgctggttctcgatcgctcttctctcgactgacgaccgcaatgcgccactcgctcccactcttcgtcctcggtattggtcgactactgagcgtcaagagtcttgactatgccgagcatgtcagcgagtatggggtgcactggaacttttttttcacgcttgctcttctcggaccagctgttgcctttttggagccactgttgcgcctgtttcgctcgtgcggtttcttcgcctttgtcctggccattggatacgagttgatcttattcatggtgcctgacatgaagcgctatattattctatccgagcgaattccaggtgacttgctgtcgcagaacagggaaggcgtcttctccttcctcgggtacttggcaatcttcatcgctggaatgggaattggactgaacatcctgccccgggacccggaaccagaagatccaagacttgcttttctgaacagggaccctttggacgaggacgcggagtggcttgcatctgttatcggtggatctgcagaagacgcacagaagaaggaggcagcccccgtgcctataccgcagttgaagcccgagctacctaagactgcactgccccggctcgccatgtggacgggcatgtggttcatcttcgcagggtgggcgatgtggaagtatggcccacgactatttgtctcgcgtcgcatggccaacctcgcctacgtctgctgggtctgctcattcaacacggcgcaacttctgctctttgctttgatagagcgcgtgttcttcccatacctctatgaggcgaagacgaagactgaggaacggcgccgagtccaagaagccacgagcagagtcatgcacgctttcaaccgtaacggtctggctctgttcctgctggcgaacttgctcactggcgccgtgaatatgacgatgccaacattgcacatgagtgacgtttcatctatgacggtccttgtggcatacatggccacgttgtgcagcgttgcactggcacttgatcactataatatctcgataaagctatag

SEQ ID NO: 324 - protein, 542 aa, Mycosphaerella pini
MTPEYKAEKEASVSWLGGGGMWEINHVALVAPAAAFLWAMLQSRQLFFKPYTSAAAFTDFLIQCCAILFATTVYSGAPQILNGLLILPALAAYLQPSTEAQKAAQKTAQTSKKPGVDSADTHKDEKDDLDPLPVKPFVTMYRGAMMIVTCACILAVDFPAVFPRRFAKTESFGTSLMDMGVGSFVFAAGVISARPQLKENHAGSRSLFSRLTTAMRHSLPLFVLGIGRLLSVKSLDYAEHVSEYGVHWNFFFTLALLGPAVAFLEPLLRLFRSCGFFAFVLAIGYELILFMVPDMKRYIILSERIPGDLLSQNREGVFSFLGYLAIFIAGMGIGLNILPRDPEPEDPRLAFLNRDPLDEDAEWLASVIGGSAEDAQKKEAAPVPIPQLKPELPKTALPRLAMWTGMWFIFAGWAMWKYGPRLFVSRRMANLAYVCWVCSFNTAQLLLFALIERVFFPYLYEAKTKTEERRRVQEATSRVMHAFNRNGLALFLLANLLTGAVNMTMPTLHMSDVSSMTVLVAYMATLCSVALALDHYNISIKL

SEQ ID NO: 325 - DNA, 1500 bp, Nectria haematococca
atgtctgattccgccagctacaagcagcgaaaggaggactttgtgtccaacctctcaggcggctccgtcgcagagatcaactatgtcacatccgttgccgctgtcgccataatcctctggtccgtcctccaagcccgccagtccttctttgagcagtataccgtcctcgcatttgccgtcgatttcctcctcaatgtcggcgccatcctcctctccacgacgctatacgcgggcacaccggtcctgctaaacctccttctgatcgtgcccgccatcctcatctttacgctcccgccgaactcgatcaaccgaaagaagaagcttaaggtcccgcctaatgcgcggtccaagggtagctcgggacagctcgacgtcctctcgaccaagccgttcctgacaaacttccggggctgcatgatgattgtcacctgcgtcgcaatcctggctgtcgacttccgtttgttccccaggcggtttgccaaagttgagacgtggggcacatccctgatggatctgggtgttggatcctttgtcttctcaggaggtctcgtcgcagctcgtcccgtgctgcgggagaaagctgtaggccgcactacaggacgggcgacgcccctgattcatcggatcattcactcgatgcgccattctatcccgctattggttctgggtgtgatccgactgctcagcgtcaagggcctggactacgccgaacatgtcacagagtatggtgtgcactggaacttcttcttcacgcttggtttcctgcctccatttgttgccatcttccaagcagccctcagatggatcccttcttttgcagccttgtcgctgctggtcggtatcagttatcaggttttgcttgagactaccaacctgaaagcctacgttctcaccgcgccaaggacagacctgatttccatgaaccgagagggaatctttagtttcattggatatcttgccatcttccttgccggccaggatacgggcatgtttgtcatcccccgaaacatccctccaaggagcaccgccagcccaggagctcagaggaacacactcctaatgaccatggttgtctggggaggtgtctggacaggactctacttgctttccacaaactaccattacggatttggcctaacggtttcacgacgtctagcgaaccttccctacgtcctttgggttgttgcgttcaacactctgcaacttgctgggttcgccattgtcgacactgctttcttccctgcgttctataatgcgcaagatgccaagaccgagaaggaggcttatgaaaaggccactagccgtgtgatacgagcctataaccgcaacggtctggctgttttcttggtggctaacctcctgactggcttggtcaacatgactgtcaagacgctggatgctagtccggctgcaacaattggcattttggtggcgtacatgtcaactatcactggcgttgctttagcattggacgcctacaacatcaatatcaagctttga

SEQ ID NO: 326 - protein, 499 aa, Nectria haematococca
MSDSASYKQRKEDFVSNLSGGSVAEINYVTSVAAVAIILWSVLQARQSFFEQYTVLAFAVDFLLNVGAILLSTTLYAGTPVLLNLLLIVPAILIFTLPPNSINRKKKLKVPPNARSKGSSGQLDVLSTKPFLTNFRGCMMIVTCVAILAVDFRLFPRRFAKVETWGTSLMDLGVGSFVFSGGLVAARPVLREKAVGRTTGRATPLIHRIIHSMRHSIPLLVLGVIRLLSVKGLDYAEHVTEYGVHWNFFFTLGFLPPFVAIFQAALRWIPSFAALSLLVGISYQVLLETTNLKAYVLTAPRTDLISMNREGIFSFIGYLAIFLAGQDTGMFVIPRNIPPRSTASPGAQRNTLLMTMVVWGGVWTGLYLLSTNYHYGFGLTVSRRLANLPYVLWVVAFNTLQLAGFAIVDTAFFPAFYNAQDAKTEKEAYEKATSRVIRAYNRNGLAVFLVANLLTGLVNMTVKTLDASPAATIGILVAYMSTITGVALALDAYNINIKL

SEQ ID NO: 327 - DNA, 1437 bp, Phytophthora infestans
atggacgaggactacaagctcgccaaggaggccttcgtctctggcctccagggcaccagcgcatcggaagtttttctcgtttttgccctcgcacctgggagtttatggctttattcggagcttatgctgctgctagaggtcgtggggatccgacaactgggcgccggtaatttaaacttggtagcgacgatcttggtggagttcatcgtgacggtggtgcctacgatgatcggctttagctatgccgagtatgcaatcccgctgcttgcgatggtatattcactggcggcgacgtttagtgctctgtcccgattccatgccaaggattttattcgcaagcactgcaggaaagagaagatgaaccaactgctcgagaaggagctgccattcttgacaaacttccgcgcgcagatcatgatctctacgtgcttcgcgatcttggcagtcgacttcaccgtcttccctcgtcgctttgccaagacagaaaactttgggttcagtgtgatggacatcggagttggtgcgtttatcgtttcttctgcaattgtgtcagcacctgctcgtcaagcccgtcctagcgcaagcaccaagagacctcgcctcgatccacccgagagcattgtgaagaaatgctacgcgttccttcgaccgattgcgcttgtgctggtgtttggagctgcaagatttctgactgtgaaaggtgtcaactatcaggaacatgtgtctgagtatggagttcactggaacttctacttcactctagcaggagtgtatcttgtgtactccttccttcgtggcttcggtaaatgggcttgcggccccattgcggcgatattaattgcagtcagctaccaagtgtatctatctcattttggcggtgaagagtacatcttaaatgctcctcgtcacaatttgatgagtcagaaccgcgaagggattcttagtctagcgggctacacctcgctctacatgctgtcggtatacattggccagtgtattttcggctacatggactccaacgtgttgaaacttcaccgcaacatgaggtggcttacgatcgcgctctttgtcatctccgggttggtatgggtctcaactttcctctctgtgcgtcttgttgcacgtccgtcccgtcgaatgttgaacgtgtcgtacttgctgtgggtcatggctgagtccctcaccctactcgctctctatagcgggactcaaactgtctgtatgctgccgagagtgccgatacttttccagggtatcaattacaaccagctctttatctttattgtggccaatctcacgacaggcgcggtaaacctaagcatgcatacaatcagctcgagcaccattgcggcgtccggcgtgcttgtggcatacatgtttgcagtctgcgtgctcgcctcggtgttgcagtacacaactatccgtatcaagctgtag

SEQ ID NO: 328 - protein, 478 aa, Phytophthora infestans
MDEDYKLAKEAFVSGLQGTSASEVFLVFALAPGSLWLYSELMLLLEVVGIRQLGAGNLNLVATILVEFIVTVVPTMIGFSYAEYAIPLLAMVYSLAATFSALSRFHAKDFIRKHCRKEKMNQLLEKELPFLTNFRAQIMISTCFAILAVDFTVFPRRFAKTENFGFSVMDIGVGAFIVSSAIVSAPARQARPSASTKRPRLDPPESIVKKCYAFLRPIALVLVFGAARFLTVKGVNYQEHVSEYGVHWNFYFTLAGVYLVYSFLRGFGKWACGPIAAILIAVSYQVYLSHFGGEEYILNAPRHNLMSQNREGILSLAGYTSLYMLSVYIGQCIFGYMDSNVLKLHRNMRWLTIALFVISGLVWVSTFLSVRLVARPSRRMLNVSYLLWVMAESLTLLALYSGTQTVCMLPRVPILFQGINYNQLFIFIVANLTTGAVNLSMHTISSSTIAASGVLVAYMFAVCVLASVLQYTTIRIKL

SEQ ID NO: 329 - DNA, 1443 bp, Phytophthora sojae
atggacgaggactacaagctcgccaaggaggcgttcgtggccggcctccagggcaccagcgcgcgcgaggtcttcctcgtgttcgccatagctccagggagcttatggctctactcggagcttatgctgctgctggaggtcgtgggcatccgacaattgggagcgggcaacttgaacttggtggcgacgatcctgctcgagtttgcagtgaccgtggtgccgacgatgatcggttttacgttcgccgagtacgcggtgccgctgctggcgatggtgtactcgctggcagcgattcttagtgctctgtcctggttccacgccaaggagttcattcacaagcactgcaggaaggagaagatgaaccagctactggggaaggaactgccgttcctgaccaacttccgcgcacaaatcatgatctcgacgtgtttcgcgattctggctgttgacttcacggttttccctcgccgcttcgccaagacggaaaactatggcttcagtgtgatggatattggagttggcgcgtttatcgtgtcgtccgcgatcgtgtcagcacctgcgcgtcaggctcgccccagcattggcacgaagagagcccactcggaccagaagccagcgcaaagctttgttcaaaagctttacgcgttcgtccgaccgattgcacttgtgctcgtgttcgggattgcgaggttcctaacggtcaagggtgtcaactaccaggagcacgtatccgagtatggtgtgcactggaacttctacttcacgcttgcgggagtgtatctggtgtactccttccttcgcgctttcggcaaatgggcttcgggccccgccgtcgcgattctcattgcttgtggctatcaggtatatatgtcccagctcggcggtgaagaatatatcctggatgcacctcgggacaatttgatgagccagaaccgcgagggaatcctaagcttggcaggctactcttcgctctatttgctctccgtttatgcgggtggatgcattttcggctatatggactccaacggggcgaagctgcaccgtaacatgaggtggctcgtgatcagcctctttgtcgtggccgcattcctctgggctacgacgttcctctccgtgcgcctcgttgcacgtccgtcacgtcgtatgctcaacttgtcgtatttgctatgggtcatggccgagtcgatcacattgctggcgctctactgcgcgatccagactgtatgtatgcttccgagggtgcctctgctgttccaggggatcaaccacaaccagctcttcgtcttcatcgtggccaacctgatgacgggcgccgtgaatctgagcatgtacaccatcaacaccagcacaggcgtggcctccgcagtgctgctgctctacatgctggcagtctgcatcctggcctctgtgctgcagtacgcgcacatccgcatcaagctctga

SEQ ID NO: 330 - protein, 476 aa, Phytophthora sojae
MMDEDYKLAKEAFVAGLQGTSAREVFLVFAIAPGSLWLYSELMLLLEVVGIRQLGAGNLNLVATILLEFAVTVVPTMIGFTFAEYAVPLLAMVYSLAAILSALSWFHAKEFIHKHCRKEKMNQLLGKELPFLTNFRAQIMISTCFAILAVDFTVFPRRFAKTENYGFSVMDIGVGAFIVSSAIVSAPARQARPSIGTKRAHSDQKPAQSFVQKLYAFVRPIALVLVFGIARFLTVKGVNYQEHVSEYGVHWNFYFTLAGVYLVYSFLRAFGKWASGPAVAILIACGYQVYMSQLGGEEYILDAPRDNLMSQNREGILSLAGYSSLYLLSVYAGGCIFGYMDSNGAKLHRNMRWLVISLFVVAAFLWATTFLSVRLVARPSRRMVRILLSSLTTLNLSSDILANYSMLPRVPLLFQGINHNQLFVFIVANLMTGAVNLSMYTINTSTGVASAVLLLYMLAVCILASVLQYAHIRIKL

SEQ ID NO: 331 - DNA, 1287 bp, Puccinia graminis
  misc_feature: Puccinia graminis f. sp. tritici
  misc_feature (164)..(164): n is a, c, g, or t
atgacgagttacaaggaggagaaggaaggtttcgtgtccaatggagggggttgttcaggctcggatatcgtagccatcttggccagtcttttgctcacccatctgctccatcgatcactgaataataaccacgtcgaaaagagaccagacggaaccactttccngaagaatgatgaccgagcttacgagcttagtggtccccttactggcgatcaccacgatcctcagcgaatggctgtggacgagcaatctttgtctagctctggctgctctgatagggtcgcggatgaggaggagactaggaaggaggagagaagaggccctggagcgacgccgagtgcaattatatcgtctaatgaccagtcagaacatccacttctcaccgagcatcatcctcatcatactccgctcgacggggacagccaaaatactagcctcagacgccgactcatcgagtctgatcatcaagtccttctcaccggcttcccagtccccgacccatcttcctcctcctcaactccccaaatccccgccgttcttcgtttctcgcatcagccctttctcactatctatcgcgcccaacttgtcctcctcacttcgatctccatcttggccgtcgacttcactatcttccctcgtaaattcgctaagactgaatcttggggtatctctctcatggattcaggtgttggttcatttgtgttttcattgggcatcatctcggcccttccgatcctcaaacgagtctcttcctctctctgctccacaaacctccctcaacaaccgatcttgagcgagctttggagaagcactcgcaaaactgttccgctgttcctgttgggtctcatccggatcatcttcgtcaaaggcgtcgattatcctgaacatgtgactgaatacggcgtccattggaacttcttctttactttatctatcctccctctaaccggagtattaaccaaacgtttctacgaaagatttcggatcaatttagccttaattggactcttactagccatatgtcatcaatctcttctcagtgtagttgggatacaagagtatgtgctttcatcgcgagaacggacgagtttgatctcagcgaaccgagaaggactagcgagtattccaggatacatggtgatctatgtcctcgggctttctgcaggtacatacatcttacccccttcgccggacttcttggatcgagtccttcgagatcgacagaatcgaccagacaagctcgtcagtcggcaacctggaaaggcgttggtggtctactctagttgg

SEQ ID NO: 332 - protein, 563 aa, Puccinia graminis
MTSYKEEKEGFVSNGGGCSGSDIVAILASLLLTHLLHRSLNNNHVEKRPDGTTFRRMMTELTSLVVPLLAITTILSEWLWTSNLCLALAALIGSRMRRETRKEERRGPGATPSAIISSNDQSEHPLLTEHHPHHTPLDGDSQNTSLRRRLIESDHQVLLTGFPVPDPSSSSSTPQIPAVLRFSHQPFLTIYRAQLVLLTSISILAVDFTIFPRKFAKTESWGISLMDSGVGSFVFSLGIISALPILKRVSSSLCSTNLPQQPILSELWRSTRKTVPLFLLGLIRIIFVKGVDYPEHVTEYGVHWNFFFTLSILPLTGVLTKRFYERFRINLALIGLLLAICHQSLLSVVGIQEYVLSSRERTSLISANREGLASIPGYMVIYVLGLSAGTYILPPSPDFLDRVLRDRQNRPDKLVSRQPGKALVVYSSWAIIWWSLFFLCNLFGFPPSRRLANPTYCFWIAALNLSLITGHSFIHDVLFRPDHPSSKPLERSQNSTKNIPLIFQFINQNSLAIFLFANLLTGLINLSVHSIYLDPTLAFFLLLLYSVLITIFAWSIKSFKLSL

SEQ ID NO: 333 - DNA, 1470 bp, Pyrenophora teres
  misc_feature: Pyrenophora teres f. teres
atggcgaaaacgtataagcagatgaaggaggcctgggtgtcggggcacaccgggagctccgtagcagacgtcaatagcgtctcgctcgcaatgcctttgagcatcttgctatggtccgtgatacagtcacgtatgcgcttgttcacaccgtacacattacccgcctttttcatcgacttcctgctcaattgcggagcgacgttgtttgcaaccaccatttactcgccttcgccgtggactctgaacctccttcttctactacctgctatcaccatatatgcgcttgagaagccagcgacagccagagaccccccgcgaccacccaagattgatacggctgaaaaggactccaaactagatgcacttcctgtcaagccgttcatcacaaattatcggggagcaatgatggtcatcacctgcgttgctatcctggctgtcgacttccgtgttttccctagacgctttgcgaaggtggagaattggggtacatcgcttatggatatgggagtagggtctttcgtcttcactgctggcgtggtttccgtccggtcgtctcttaaagaaggcgcaggccgtcagccactagccaagcggctaacggcatcacttagacatgccattcccctcctcattctcggtactattcgtctcatctctgtaaagggcctggactatgccgagcatgtgagtgagtacggggtgcattggaacttcttcttcactctaggattcctaccacccttcgctgccctcttccagacagcatttgatatggtgccttcttacgctgttctctcttttgcgcttgcagcaatctacgagattgctctagactggacatcactgggatccttcatcctggtagccccacgaactgatctcttttcccagaaccgcgagggcatattctccttcttcggttatcttgctatatttcttgcaggccaatcactaggtgcttccgctctaccaaggcaacagcaaatcccaaaagatgcatcaattacagacaaagtccggcaatctactctcggcaagctcgtcacgacatctgtgttctggaccgtactgttctacttctcaaccagctattacggtctacgactgccggtatcgcgaagactcgccaatcttccctattttctctgggtctcgtcgtttaacagctaccaaatcaccatatgctgcgccatcgagactttccttttcccgaacctctacaaagctaccactaaagaggaagaagctcggaggagtcgaggtgctaccagcactgttctctacgctttcaaccgcaatggtctagcggtttttctggttgcgaacctgctcacaggcttggtcaacatgacgatgccgaccctgcatatgagcgttctgcagtctatgggagtacttgtggcatatattgctgctgttgcaggcgttgccattgttttggacttttacaatgtaacaataaagctttga

SEQ ID NO: 334 - protein, 489 aa, Pyrenophora teres
MAKTYKQMKEAWVSGHTGSSVADVNSVSLAMPLSILLWSVIQSRMRLFTPYTLPAFFIDFLLNCGATLFATTIYSPSPWTLNLLLLLPAITIYALEKPATARDPPRPPKIDTAEKDSKLDALPVKPFITNYRGAMMVITCVAILAVDFRVFPRRFAKVENWGTSLMDMGVGSFVFTAGVVSVRSSLKEGAGRQPLAKRLTASLRHAIPLLILGTIRLISVKGLDYAEHVSEYGVHWNFFFTLGFLPPFAALFQTAFDMVPSYAVLSFALAAIYEIALDWTSLGSFILVAPRTDLFSQNREGIFSFFGYLAIFLAGQSLGASALPRQQQIPKDASITDKVRQSTLGKLVTTSVFWTVLFYFSTSYYGLRLPVSRRLANLPYFLWVSSFNSYQITICCAIETFLFPNLYKATTKEEEARRSRGATSTVLYAFNRNGLAVFLVANLLTGLVNMTMPTLHMSVLQSMGVLVAYIAAVAGVAIVLDFYNVTIKL

SEQ ID NO: 335 - DNA, 1470 bp, Pyrenophora tritici-repentis
atggcgaaaacatataagcaaatgaaggaggcctgggtgtcggggcacaccgggagctccgtagcagacgtcaatagcgtctcgctcgcaatgcctttgagcatcttactatggtctgtgatacaatcacgtatgcgcttgtttacaccgtacacattacccgcctttttcatcgacttcctgctcaattgcggagcgacgttgtttgcaaccaccatttactcgccctccccgtggactttgaacctgcttcttctactaccggcaatcaccatatacgcccttgagaagccagcgacagccagggatcccccgcggccacccaagattgataaggcggagaaggactccaaactagatgcactccccgtgaagccattcattacgaattatcgaggcgcaatgatggtcatcacttgcgttgctatcctggcggtcgacttccgtgttttccctaggcgctttgcgaaggtggagaactggggtacgtcactcatggatatgggtgtggggtcttttgtcttcactgctggtgtggtttctgtgcggtcgtctcttaaagaaggtgcaggccgtcaaccactagccaagcggctaacggcgtcactcagacatgccgttcccctcctcattcttggtactatccgtctcatctctgtaaagggcctggactatgccgagcatgtcagtgagtacggggtgcattggaacttcttcttcactctagggttcctaccaccctttgctgccctcttccaaacagcatttgacttggtgccttcctacgctgttctctcctttgcgctcgcagcaatctatgagattgctctagactggacatcgctgggatccttcatcctggtagccccgcgaactgatctcttctcccagaaccgcgagggaatcttctccttcttcggctatctcgccatctttcttgcaggccagtcactgggtgcttccgctctaccaagacaacagcaaatcccaaaagatgcatcaatcacagacaaagtccgacaagctactcttggcaagcttgtcactacatctgtgttctggactgtattgttctacttctcaaccagctattacggtctacgactaccggtatcgcgaagactcgccaatctcccctacttcctctgggtctcgtcgttcaacagctaccaaatcaccatatgctgcgcgatcgagaccttccttttcccgaatctctacaaagctatcactaaagacgaagaaactcggaggagtcgagatgctaccagcaccgttctctacgcttttaatcgcaatggtctggctgttttccttgttgcaaacctgcttactggattggtcaacatgacgatgccgacgctgcatatgagcgttctgcagtctatgggggtacttgtggcgtatattgctgctgttgcatgtgttgctattgggttggacttttataatgtaacgatcaagctttga

SEQ ID NO: 336 - protein, 489 aa, Pyrenophora tritici-repentis
MAKTYKQMKEAWVSGHTGSSVADVNSVSLAMPLSILLWSVIQSRMRLFTPYTLPAFFIDFLLNCGATLFATTIYSPSPWTLNLLLLLPAITIYALEKPATARDPPRPPKIDKAEKDSKLDALPVKPFITNYRGAMMVITCVAILAVDFRVFPRRFAKVENWGTSLMDMGVGSFVFTAGVVSVRSSLKEGAGRQPLAKRLTASLRHAVPLLILGTIRLISVKGLDYAEHVSEYGVHWNFFFTLGFLPPFAALFQTAFDLVPSYAVLSFALAAIYEIALDWTSLGSFILVAPRTDLFSQNREGIFSFFGYLAIFLAGQSLGASALPRQQQIPKDASITDKVRQATLGKLVTTSVFWTVLFYFSTSYYGLRLPVSRRLANLPYFLWVSSFNSYQITICCAIETFLFPNLYKAITKDEETRRSRDATSTVLYAFNRNGLAVFLVANLLTGLVNMTMPTLHMSVLQSMGVLVAYIAAVACVAIGLDFYNVTIKL

SEQ ID NO: 337 - DNA, 1500 bp, Sclerotinia sclerotiorum
atgtcgcgggcagctgaggcagctatggctgctagttataaaagcttgaaggaggattttgtgtcaaatttgacaggaggcagccttggagagataaatatggtcactgctgtcgttccagtcgcagttattctttggtcgactttacagacccggcagcattttttcctgcaatatactccaatcgctttcgctgtcgacttccttctcaatgtcggggctattctgttggccatatctgtctacgcagatatgcccctcactttgaatctcctactacttgcgccggttcctttattgtatgccattgcaccgcaaaaatctacacaaaacgctccgcaaaagaaaccaagaataccgcaatcgaaaacaaccccttcagaccaattgaacccactctcaaagaaacctttccttaccatctaccgaggggcaatgatggttatcacttgtctagctatactagcggtcgatttcaagatttttccacggagatttgcaaaagtagaaaactgggggacatcgttaatggacctgggagtaggatcctttgtgttctcaggtggtcttgtaggagctcgaccaatactcagagaacaaagtgctggccgaacgtcgaagctcagcacgcgcttatataactcgttgcgccatgcactacccttgattgttctgggaaccataagattatacagcgtcaaggggttagactatgcggagcatgttactgagtatggggtgcactggaatttcttttttacccttgcgttcattcccccattcgtggcgatattccaatctgcttttcagctcatcccgtcatacgcgctactggcaattattcttggctctttgtatcaagttgctctcgaatacaccagcctcaaagctttcatcctcacagctccaagaacagatctattctcaaaaaatcgtgaagggatcttcagcttttttggctatctcgcaatttttctagctggtcaagcaacggggatgttcgtattacctcgcaattcaatgccaaccggaggcccattggctcagagaaaacgcctcttgatgacgatgggtgcatggtcaggagtatggattacgctctatttattcacgacaaattacagatatggattggcattaagtgtgtcacgccgtctcgcaaaccttccgtatttcctatgggttgcagctttcaattgctcacaattgactgcattctgtttgatcgaaacgatattttctccagtccatagaagcatggatgcaaagaccgagaaggagaattatgaattctcgacaagtcgagtccttgaagcgttcaatagaaatggcctggcaattttcttggctgcaaatttacttacaggactcgtcaaccttaccataccaactttgtttgtcagcaacctccaggctatggggatattactattttatgcctctgccctgacaggacttgcagtaggtctggatgtatatgatatttctattaaaatgtaa

SEQ ID NO: 338 - protein, 499 aa, Sclerotinia sclerotiorum
MSRAAEAAMAASYKSLKEDFVSNLTGGSLGEINMVTAVVPVAVILWSTLQTRQHFFLQYTPIAFAVDFLLNVGAILLAISVYADMPLTLNLLLLAPVPLLYAIAPQKSTQNAPQKKPRIPQSKTTPSDQLNPLSKKPFLTIYRGAMMVITCLAILAVDFKIFPRRFAKVENWGTSLMDLGVGSFVFSGGLVGARPILREQSAGRTSKLSTRLYNSLRHALPLIVLGTIRLYSVKGLDYAEHVTEYGVHWNFFFTLAFIPPFVAIFQSAFQLIPSYALLAIILGSLYQVALEYTSLKAFILTAPRTDLFSKNREGIFSFFGYLAIFLAGQATGMFVLPRNSMPTGGPLAQRKRLLMTMGAWSGVWITLYLFTTNYRYGLALSVSRRLANLPYFLWVAAFNCSQLTAFCLIETIFSPVHRSMDAKTEKENYEFSTSRVLEAFNRNGLAIFLAANLLTGLVNLTIPTLFVSNLQAMGILLFYASALTGLAVGLDVYDISIKM

SEQ ID NO: 339 - DNA, 1449 bp, Septoria nodorum
atggcgaagacgtacaaacaactcaaggaggcctgggtgtcgggtcacaccggcagctccgtcgctgacgtcaatagcgtctcgctcgcaatgcctttgagcatactactgtggtctgtcgttcagtcacgcatgcgattgttcacgccatatacggttcccgcctttctcgtggactttctgctgaattgcggagttacgctgttcgctacgaccatttactcgtccacgccatgggtcttgaacctactactgctgctccctgcagttatactagtcgtccttgagaagccagtacaagcgaagaaagaggcaaggccacagaagaaggacgacaatgcgaaggactccaagcccgacccgcttcctgtgaagccattcatcacgaactaccgcggcgcaatgatggtcataacctgtgtcgcaatcctggcagtcgactttcgcgtcttcccccggcgctttgcaaaggtggaaaactggggaacatcgctcatggacatgggcgtgggctccttcgtcttcacagccggcgttgtgtccgtccgatcctcgctgaaagaaggcacaggcagacgcccaccactatcccagcgtctcctcacatcaatccgccactcgatcccgctcctcgttctcgggaccatccgcctcatctccgtcaagggtctggactacgcagagcacgtcaccgagtacggcatccactggaacttcttcttcacactcggcttcctcccgcccttcgtcgccctcttccagaccttcttcgacctcgtgccctcctacgcaatcctatcctgcacccttgccgctctctacgaaatcgccctcgactggacctccctaggctcctacatcgtgattgccccgcgcacaaacctactctccaagaaccgcgaaggcatattctcgttcatcggctacctggcgatattcctcgccggccaatccctcggctcaatcgccctcccgcggcaacaagcactccccaagaactcctcccttggcgccaactcgccatcgcgtctctgctctggactgccctcttctacttctcaacatctgtactacggcctccgtctctccgtgtcccgacgcatcgccaatctcccatacttcctgtgggtcagcgcgttcaacagctaccaaatcactatctgctgcggcatcgagaccctcttatttccgaacttgtacaaagcgcctaccaagtcggaagaaaaagcgcgcaccagggaggcgacgagtagcgtcttgtacgcgttcaatcgaaacggattagcggtgtttttggtcgcgaatttactgacggggttggtaaacatgacgatgccgacgctgcacatgggcgtgttggagagtatgggtgtgcttgtcgcgtacacggttgctgtggcgggcgttgctgtggggttggattggtgggatgtttcggttaagctgtag

SEQ ID NO: 340 - protein, 482 aa, Septoria nodorum
MAKTYKQLKEAWVSGHTGSSVADVNSVSLAMPLSILLWSVVQSRMRLFTPYTVPAFLVDFLLNCGVTLFATTIYSSTPWVLNLLLLLPAVILVVLEKPVQAKKEARPQKKDDNAKDSKPDPLPVKPFITNYRGAMMVITCVAILAVDFRVFPRRFAKVENWGTSLMDMGVGSFVFTAGVVSVRSSLKEGTGRRPPLSQRLLTSIRHSIPLLVLGTIRLISVKGLDYAEHVTEYGIHWNFFFTLGFLPPFVALFQTFFDLVPSYAILSCTLAALYEIALDWTSLGSYIVIAPRTNLLSKNREGIFSFIGYLAIFLAGQSLGSIALPRQQALPKNSSLGANSPSRLCSGLPSSTSQHLYYGLRLSVSRRIANLPYFLWVSAFNSYQITICCGIETLLFPNLYKAPTKSEEKARTREATSSVLYAFNRNGLAVFLVANLLTGLVNMTMPTLHMGVLESMGVLVAYTVAVAGVAVGLDWWDVSVKL

SEQ ID NO: 341 - DNA, 1467 bp, Setosphaeria turcica
  misc_feature: Setosphaeria turcica (strain 28A)
atggccaaaacatacaagcagttgaaagaggcatgggtttcaggccacacggggagctctgtggcagacgtgaataatgtgtcgctcgcaatgcctctgagcatcctgctatggtctgtcatacagtcgcgcatgcgcttgttcacgccgtatacaccgccagccttgttcctcgacttcctgctcaactgcggagccacgctgttcgcaaccactatctactcatcttctccatggatcctaaacctccttctgttgctaccggcaattgcagtatacgccctcgagaaaccagttccagccagagatgctccaagaccacccaagatcgacaagtctggaaaggactccaagctcgacgcgcttcccgtcaagccattcatcacaaattaccgcggcgcaatgatggtcataacgtgtgttgctatactcgccgtggactttcgcgtatttccacggcgatttgcaaaagtcgagaattggggtacgtcgctcatggacatgggtgtggggtctttcgtctttaccgctggcgtggtttccgttcgggcttcactcaagggaggttccggccgtccatcattatctaagcgcctaaccgcatcgctcagacacgccattcctctgcttgtccttggtgtcattcggctcatttccgtcaagggattggactatgcagaacacgtaactgaatatggcgtgcattggaacttcttctttaccttgggttttctgccaccgtttgctgccctgttccaggcagcatttgatctggtaccttcttatgcctttctctccttcatgttggctgccatctacgaagtggccttggactggacgtctctcggggcatatatactggtggccgaacgcaaagatctactgtcaaagaaccgagaaggcgtcttctccttcttcggataccttgcgatattcttggctggccaatccctgggtatgtctgcactacccagacaacaacagatctccaaggatgcatcattcaccgtcaagctcaagaaatccacgcttggaaagcttgcgacaatgtctgtcatctggaccacacttttctacttttgtaccagctactacggccttcgcctgactgtctcaagacgactggctaaccttccatactttctttgggtatccttgtttaacagctaccaaatcaccatatgttgcgccatcgagacattcctctttccgaacttgtacaaggctgcgaacaaagaagaagaggttcgacgcagcagagatgctaccagtaccgtgctgtatgcgttcaatcgcaacggcctggctgtattcctggtcgcaaatctgctgacgggcctagtaaatatgacgctaccaactctggacatgactatgatccagtccatggtggtgcttactgcatacatcgcagccgtggccggagtcgcgattggcctcgattattacaatgtcacaataaagctc

SEQ ID NO: 342 - protein, 489 aa, Setosphaeria turcica
MAKTYKQLKEAWVSGHTGSSVADVNNVSLAMPLSILLWSVIQSRMRLFTPYTPPALFLDFLLNCGATLFATTIYSSSPWILNLLLLLPAIAVYALEKPVPARDAPRPPKIDKSGKDSKLDALPVKPFITNYRGAMMVITCVAILAVDFRVFPRRFAKVENWGTSLMDMGVGSFVFTAGVVSVRASLKGGSGRPSLSKRLTASLRHAIPLLVLGVIRLISVKGLDYAEHVTEYGVHWNFFFTLGFLPPFAALFQAAFDLVPSYAFLSFMLAAIYEVALDWTSLGAYILVAERKDLLSKNREGVFSFFGYLAIFLAGQSLGMSALPRQQQISKDASFTVKLKKSTLGKLATMSVIWTTLFYFCTSYYGLRLTVSRRLANLPYFLWVSLFNSYQITICCAIETFLFPNLYKAANKEEEVRRSRDATSTVLYAFNRNGLAVFLVANLLTGLVNMTLPTLDMTMIQSMVVLTAYIAAVAGVAIGLDYYNVTIKL

SEQ ID NO: 343 - DNA, 1638 bp, Sphaerulina musiva
atgacaccggagtacaaggcgcagaaggaggctgccgtgtccttcttgggcggcggcgggatctgggaaattaaccatgttgccctggtggccccggccgccgcctttctgtgggcaatgctgcagacgcgacagaactacttcaaacagtacactgtcgccgccgctttctccgatttcctgatacaatgtggagccatcctgttcgcgaccacggtctatgctggtgcgcctcagatactgaatggcttactgctgctgcctgccatcgctgcgtacctgcagcccagtccagaagtcaaaaagtccgtcaaaccacctacgaaagtgggtgccaaggaaaaatcctcagccgacgagcccaagaagaccgaggatgacgagaagaaggacgatctgcccgtgaagcccttcatcaccgcttaccgtggcgccatgatggtcatcacgtgttcgagcatactggctgtggactttccggtcttcccacgacgctttgccaagacagaatcgtttggcacatcactcatggacatgggcgtgggatctttcgtgtttgccgccggcattgtcgcagctcgtcagcagctcaaggaggaccaagaggcttcgcggtctctcgtgaaacgattcaaagctgcgctcaggcactctttgcctctcgcagctctgggccttgcccgcctctggagtgtgaagagtctcgactatgccgagcatgtgagtgagtatggtgtccactggaacttcttcttcacccttgcgctcctgtcccccgccattgcgatactacagccgctgttgcgctacacacaatatgttggcgggtacaacatctttgcatttgtgcttgccatctgttacgagatcatcctatactgcgtgcccgatatgaaggcctatatcattctctccgagcgcaagcctggcgactggctgtcgcagaacagagagggagtcttctccttcattggatacctggccatattcatttgcggcatgggtgccggtgtgaacatccttccacgcgagcctgaacccggcgcgaggaaactgctccaaaaggatcccctcgaggccgacgaagactggcttgcttcagttctcggagctgccgaaaaggaggacgaaccgaacaaggcagcacccccgccaatggagatgcccaaactcaagccagagtggcccaagccaactcttcatcggctgggcgcgttgacgttcatgtggttcatcttttccacgtgggcaatgtggagatatggtccccgattgttcgtgtcgcggagaatggccaatctggcatacgtctgctgggtatgcacgttcaactacgcacagctcctcttattcaacatcattgagaaaatcatgtttccgaatgtatacacggcaaagacaaaagaggcagagcgctcccgcatccgcgacgccactagcccggtgatgcgcgcgtacaaccgcaatggtctggccatcttcttactggccaacttgctcacgggtctggtcaatatgactctgcccaccatccacatgggtgatgttcctgccatgacggtattggtcagctatatgggtgtactcaccgcagtcgcactcgcactcgaccattacaacatttccatcaagctatag

SEQ ID NO: 344 - protein, 545 aa, Sphaerulina musiva
MTPEYKAQKEAAVSFLGGGGIWEINHVALVAPAAAFLWAMLQTRQNYFKQYTVAAAFSDFLIQCGAILFATTVYAGAPQILNGLLLLPAIAAYLQPSPEVKKSVKPPTKVGAKEKSSADEPKKTEDDEKKDDLPVKPFITAYRGAMMVITCSSILAVDFPVFPRRFAKTESFGTSLMDMGVGSFVFAAGIVAARQQLKEDQEASRSLVKRFKAALRHSLPLAALGLARLWSVKSLDYAEHVSEYGVHWNFFFTLALLSPAIAILQPLLRYTQYVGGYNIFAFVLAICYEIILYCVPDMKAYIILSERKPGDWLSQNREGVFSFIGYLAIFICGMGAGVNILPREPEPGARKLLQKDPLEADEDWLASVLGAAEKEDEPNKAAPPPMEMPKLKPEWPKPTLHRLGALTFMWFIFSTWAMWRYGPRLFVSRRMANLAYVCWVCTFNYAQLLLFNIIEKIMFPNVYTAKTKEAERSRIRDATSPVMRAYNRNGLAIFLLANLLTGLVNMTLPTIHMGDVPAMTVLVSYMGVLTAVALALDHYNISIKL

SEQ ID NO: 345 - DNA, 2217 bp, Sporisorium reilianum
ctacaacttgaaccgtatgccacgcaccgtcaacacgcgcgccaacgcacaacacgcggcggtatacacgagcagcacgcccagcgcgaccgcatcgcgcgtatacatcgtgcgcaccgcgacgttgaccaggccggtgagcaggttcgcggccaaaaacaccgtcagcgcgtgcgtgttgaggtcatgcagcaccgcgggcgtcactggcccgtgagtgtgcgcttcgacgggctggagcagccacatgtacacgagcacgtacccgagcaaaaagctcgtgttgaacgcggcgacccacacgacgtacggcagattggccagtctcctgctcacccttaatccgacgcaccgcgaaagcgcgtatgcgagccaccacacgatcgcgaggctcgcgagcaccatggcgagcttgtgcgtcctcggcgtcgacctgcgccgcctcagcttgcggtacgcaaagtacggatcgagcggcagcacgtagtggccgaggtcgaggccgatgtagaacacggcgaggtagccgggcatgctcgtgaggccctccttgttctggtgcgcgagcgtggtgcgccggcgcgtgtcgtcgagcgcccacgcctgccacggcgttgcgttgagcgccacctggtgcaccgcgctgagcagcacgcccagcacgctgtaccgcacccggcgcgcaaagggccgcgagagcgtcgcggcaaacggcagcaccgcgagcgtgaagaagaagttccagtgcacgccgtactcgctcacgtgctccggatactccacccctttcaccatcgccacgcgcacgccgccgagcaccagcagggggaagctcttgcgcaggtcggacaggatctgctgcctgagcggccggaagcgcgtgcgcgggctcttgaggaacggcagcgccgagatgatgccgagcgagaacacgaacgatccaacgcccatgtccatccagctcgtcccccaggtctcgcatttcgagaggaagcgcgggaacacagggaagtcgaccgcgaggatcgagatgaccgtgacgagcatcatgtgcgcgcggtagacggtgaggaacggttgagggcgcacgaacatgttgcggtccgacctcgttgcgctgcctgctgtcgatcgcggtgctgcagcgaagttgacatcgggtggcgaagggttgccttccgtggggggcttgcccttgccccacggatcgacgacgctgcgcgctagcggcgacagcatcgcagacgacgtcgatacagccgactgcgcatcggagccgtcgcgggaatggagcagctgcatgggtgcggttttgagtgcggccagctcggtcgaccgacgcgttggcgatgggaaggaggacgtcgatgccacgtcgggcgatagcatagacgcagctgatccgaggagcgggctggccggggcagtgctgatcgaggtgtcgatggaaaggtctgcgtccgagcgagaggaggatccgggtccgtcgtagaagttgggtggggcggcggctgcgtgtgctgcgtctgcggccgagtcgatggatacgcggaagggcagctctgcctcggcagctgctgcgtttggcggcgagagtgacgcttcggctgagttggctgcatcgtcgtcgtcgtcgtcatcctcgtcgtccgagtactttttcgaccagtggcgtttctgcttgttgtccgacggcggtgcctttggcgacaatggcgggcccgaacgaatcaacaacacaagcagcgcaaccagcacgccgttcgtcgccagcagatgcgtcgccagcacggtatgcgcgcacacagcgggcacaacgagcacaagatactcgagctgcagatccgaaactctctccagcgccgtcgctatgccagccagaattggattcgccagctctctcggctgtctcctgtgctgcgctgcaacaaagcggatgcgcttcgctcgcagcacggcccatatcgcgtacgtcaaaagcatgacgagccccaacgtgttgacgacatggatcgagcttcccgtctggtcggcgatccacgcttctttgagctctttgtatgatgaagcatctgcggtgagcggtgcggggtgttgcggtattgacggtgatgatggtggctgcttgtgctgtggatgctgagcatggtggcggtggacggcgtcgatggcggcgagcggctcgtcgatggctcgtgcgccgatgaagtggtccat

SEQ ID NO: 346 - protein, 738 aa, Sporisorium reilianum
MDHFIGARAIDEPLAAIDAVHRHHAQHPQHKQPPSSPSIPQHPAPLTADASSYKELKEAWIADQTGSSIHVVNTLGLVMLLTYAIWAVLRAKRIRFVAAQHRRQPRELANPILAGIATALERVSDLQLEYLVLVVPAVCAHTVLATHLLATNGVLVALLVLLIRSGPPLSPKAPPSDNKQKRHWSKKYSDDEDDDDDDDAANSAEASLSPPNAAAAEAELPFRVSIDSAADAAHAAAAPPNFYDGPGSSSRSDADLSIDTSISTAPASPLLGSAASMLSPDVASTSSFPSPTRRSTELAALKTAPMQLLHSRDGSDAQSAVSTSSAMLSPLARSVVDPWGKGKPPTEGNPSPPDVNFAAAPRSTAGSATRSDRNMFVRPQPFLTVYRAHMMLVTVISILAVDFPVFPRFLSKCETWGTSWMDMGVGSFVFSLGIISALPFLKSPRTRFRPLRQQILSDLRKSFPLLVLGGVRVAMVKGVEYPEHVSEYGVHWNFFFTLAVLPFAATLSRPFARRVRYSVLGVLLSAVHQVALNATPWQAWALDDTRRRTTLAHQNKEGLTSMPGYLAVFYIGLDLGHYVLPLDPYFAYRKLRRRRSTPRTHKLAMVLASLAIVWWLAYALSRCVGLRVSRRLANLPYVVWVAAFNTSFLLGYVLVYMWLLQPVEAHTHGPVTPAVLHDLNTHALTVFLAANLLTGLVNVAVRTMYTRDAVALGVLLVYTAACCALARVLTVRGIRFKL

SEQ ID NO: 347 - DNA, 1605 bp, Zymoseptoria brevis
atgactccggaatacaaggcccaaaaggaagccgccgtctcctttctcggcggaggtggcatctgggagatcaaccatgtcacgctggtagctcccgcggccgcctttctgtgggccatgttgcaaacccgacaaggctatttcaagatgtacacgattcctgccgccttctcggatttcctcatacaatgctgcgccattctgtacgccattaccgtctactcttccgcgccgcaaatgctcaatggattgatgctgctgcccgccatcgctgcgtttctgcaacctgctccagaggtcgtggcggaggcgaaattcccacccaagaatgacgaagacgcaaaggcgcagagtgtcaaggacgacaaggatcctctacccgtcaagccgttcatcacaacgtatcgaggagccatgatgatcatcacgtgtgctagtatcctagctgtcgactttcccgtcttccctcgtcgcttcgccaagacggaatcatttggcacctccctcatggatcttggagtcggctcattcgtcttcgcagccggcgtggtagccgctcgacaacagctcaaggaacagcaccaagtcatgaaaggcttcgccgctcgaatgaagtccgccatgcgccactctcttcctctggtcatcctcggcttcgttcgcctctggtctgtcaaatccctcgagtacgccgaacacgtcagcgagtacggcgttcactggaacttcttcttcactcttgccctgctctccccgaccgtcgcactcatccagcccgtcctccgttgggtcccatcctacaacatcttcgccttcgccatggccatctgctacgagatcgccctctactgtgttcctgacctcaaggcctacatcatcctctccgcccgacatgaaggcgactggctgtcgcagaaccgtgagggtgtcttctctttcatcgggtacctctgcatcttcattgccggcatgggaaccggtctcaacatcctaccccgcgataccgaccctgaagaccccgtggtggaggagagagacaccatggacgaagacgccgactggctcgcctcagtcctcgatgcctccaaagcggacaccgaacagccggccgccccaccccgagtctcgcaacaaatgggcaaacccgaactccccaaacgcactctcccccgcctcgccttctggaccgccctctggttcgtcttctccacatgggcgatgtggacctatgggccccgcctcttcgtctcccgccgcatggcaaatctcgcctacgtctgctgggtatgcacattcaacaccgcacagctgtgcgcgttcgcgggcattgaggcggtgatgtttccgaatatttacaagggcaagaatcgcgcggaggagaagaagagggctgcgtatgctacgagtcgggtcatgcgagcgttcaatcggaatggattggcggtcttcttgctggctaatctgcttactggggcagtcaatctcagcatggatacgttgcatatgggtgatgtcggcgctatggtcgtgctgacggggtacatgggtgtgttgaccgctgtggcgttggcgctggatatctacgacatctctatcaagctctga

SEQ ID NO: 348 - protein, 534 aa, Zymoseptoria brevis
MTPEYKAQKEAAVSFLGGGGIWEINHVTLVAPAAAFLWAMLQTRQGYFKMYTIPAAFSDFLIQCCAILYAITVYSSAPQMLNGLMLLPAIAAFLQPAPEVVAEAKFPPKNDEDAKAQSVKDDKDPLPVKPFITTYRGAMMIITCASILAVDFPVFPRRFAKTESFGTSLMDLGVGSFVFAAGVVAARQQLKEQHQVMKGFAARMKSAMRHSLPLVILGFVRLWSVKSLEYAEHVSEYGVHWNFFFTLALLSPTVALIQPVLRWVPSYNIFAFAMAICYEIALYCVPDLKAYIILSARHEGDWLSQNREGVFSFIGYLCIFIAGMGTGLNILPRDTDPEDPVVEERDTMDEDADWLASVLDASKADTEQPAAPPRVSQQMGKPELPKRTLPRLAFWTALWFVFSTWAMWTYGPRLFVSRRMANLAYVCWVCTFNTAQLCAFAGIEAVMFPNIYKGKNRAEEKKRAAYATSRVMRAFNRNGLAVFLLANLLTGAVNLSMDTLHMGDVGAMVVLTGYMGVLTAVALALDIYDISIKL

SEQ ID NO: 349 - DNA, 1509 bp, Zymoseptoria tritici
atgactccggaatacaaggcccaaaaggaagctgccgtctccttcctcggcggaggcggcatctgggagatcaaccatgtcaccctggtagcgcccgcggccgcctttctgtgggccatgttgcaaacccgacaaggctatttcaaggtctacactattcccgccgccttctcggatttcctcatacaatgttgtgccatcttgtacgccattactgtctactcttccgcgccgcagatgctcaatggtttgatgctgctgcccgccattgccgcatttctgcagcctgctccagaggtcgtggcggaggcgaaattcccgccgaagaatgacgaagacgcaaaggcgcagaatgtcaaggacgacaaggatcctctgcccgtcaagccgttcatcacgacgtatcgaggagccatgatgatcatcacgtgtgctagtatcctagctgtcgactttcccgtctttcctcgaagattcgccaagacggaatcatttggcacttctctcatggacctcggagtcggctcattcgtcttcgcggccggcgtggtagctgcccgacaacagctgaaggaacagcatcaagtcatgaaaggtttcacagctagaatgatgtctgccatgcgccactcccttcccctggtcatcctcggcttcgttcgcctctggtccgtcaaatccctcgagtacgccgaacacgtcagcgagtacggcgttcactggaacttcttcttcactcttgccctgctctccccgaccgttgccctcatccagcccgtcctccgctgggtcccatcctacaacatcttcgccttcgccatggccatctgctacgagattgccctctactgtgttcctgacctcaaggcctacatcatcctctccgcccggcatgaaggcgactggctgtcgcaaaaccgcgagggtgtcttctctttcatcgggtacctctgcatcttcattgccggcatgggaaccggtctcaacatcctacctccggacaccgaacagccggccgccccaccccgcgtctcacaaaaaatgggcaaacccgaactccctaaacgcactctcccccgcctcgcattctggaccgccctctggttcgtcttctccacatgggcgatgtggacctatgggccccgcctcttcgtctcccgccgcatggcaaatctcgcctacgtctgctgggtatgcacgttcaacaccgcgcagctctgcgcattcgcgggcatcgaggcggtaatgtttccaaatatctacaagggcaagaatcgcgcggaggagaagaagcgggttgcgtatgctacgagtcgggtcatgcgagcgttcaatcggaatgggttggcggttttcttgctggctaatctgcttactggagcagtaaacttgagcatggatacgttgcatatgggtgatgtaggtgccatgattgtgttgacgagctacatgggtgtcctcaccgcggtggcgctggcattggacatttacgacatctcgatcaagctc

SEQ ID NO: 350 - protein, 503 aa, Zymoseptoria tritici
MTPEYKAQKEAAVSFLGGGGIWEINHVTLVAPAAAFLWAMLQTRQGYFKVYTIPAAFSDFLIQCCAILYAITVYSSAPQMLNGLMLLPAIAAFLQPAPEVVAEAKFPPKNDEDAKAQNVKDDKDPLPVKPFITTYRGAMMIITCASILAVDFPVFPRRFAKTESFGTSLMDLGVGSFVFAAGVVAARQQLKEQHQVMKGFTARMMSAMRHSLPLVILGFVRLWSVKSLEYAEHVSEYGVHWNFFFTLALLSPTVALIQPVLRWVPSYNIFAFAMAICYEIALYCVPDLKAYIILSARHEGDWLSQNREGVFSFIGYLCIFIAGMGTGLNILPPDTEQPAAPPRVSQKMGKPELPKRTLPRLAFWTALWFVFSTWAMWTYGPRLFVSRRMANLAYVCWVCTFNTAQLCAFAGIEAVMFPNIYKGKNRAEEKKRVAYATSRVMRAFNRNGLAVFLLANLLTGAVNLSMDTLHMGDVGAMIVLTSYMGVLTAVALALDIYDISIKL

SEQ ID NO: 351 - DNA, 2337 bp, Colletotrichum graminicola
atgcaccccctctctgtcctcagccttgggatcttcgtcgccggctacatcaccgcccgatgggacctggtgacacgcctctatgagcttgccatattcgcttgggactacggagttgttacacgcgccgccaagggctttgcgctcctgaccttcgtctacctcctcatctttatccccgtggaacgtttagccaccaaggaagcgaacctgcgctcggctgacatgccagaaaatgacggtttaatgaggatattctggccgacggacatccagcgctccgacctgcctggcgttgttgtgggatggaggaactcgaccctagatgtcttcgtcgtagccatactcgacgatgtcgatgccggccatgttgaattcgccctcaaaatcggcaccctcttccgaaacccccctcaccccgtaaacagcatctacgaacggtgcggccacggagcgatgcatgttttgggtctcaccaaccctagcgacgccgtcgtgctcgacccctctctgttcgtcgcgacgacgaccctggccggtgtaaagccccctcgaatcacttgtgccaaagccttgagcatacaaatcatcctctacgaccgcccgcgccctaacagaatgcaatacatttcgctcaatcctatctcgctcgctttaggaaacaaggaggctccgggcttaccaccgacagagcacatgtccgaggaggagaagcaagaactaaagatgaaggagcagaagaggaaattggtggaaaagctgaaactccacaccatcatcaagcgaaacccctcgccaaaagagaaggccctgccgaaaatcgtgaaccaaatcaactggtcctggcagctggagcagcttctgcaaaagaacatctcacggatcggtaccaggcccaagcggacactgagtgtctcggagcgggtagtggagaacgtgacaacagtgcggaacttcgtctgggacctcctgatcctatacgtgcttccgctggtccagtggggattcgtgtatatgctcatgggccatagagcggttgccgagctcctccttcagattctggagtttcgactgaaggataactacctggccctgaaggacatctcggcgacggcgcagcaagtagagatccggcttcagcaattttgctactggcccatgcagtatacgacgttgcggcagcgtaagaacgattgggagagcgtcacgactagccaccccgactacatccgtttctacaacagcctgtggctcgtcgccaatgatgttatcataggcatcgcgctgggttcctacatcatcgacaatgcggactgggccgccaatgcaatcagtgagctgttgagggtgtacacggtcgaggcgctgcaacgaagcatttcttggctcatgggctggcctgcgggtctgaaactgaacaaggagttggcgttgtttctcggagatctgtttctatgggtcatcgagtattggtcgaactgcatcgcagcccttcagccagttttgcctcgcatcatctggttcatcggcttctccagcttcgccggtgccagcatgcctatcgccatgttctcggacctgctctctggtctgacaattcacatctactccttttacctcgcgtctgctcgaatctaccactggcagctaacgatcctcatctcgctctttcatctcttccgcggtaagaagcacaatgtcctccgcaaccgcattgactcgtgcgactatgatctggaccagctccttgtcggcactatcctcttcaccctgctcttcttcctccttccgacggtggttgtattctatctcaactttgccgttgcgcggatggtcatcatctcgctcaaggccgttttcgatacacttctgtcttgtctaaaccatttccccctttttgcgctgatgttacgggtcaaggacccgagacgacttccaggcggcattcgttttgagcttcgagatacccatgattatagacttagtaatacttccaacgaaccgcctacctctgtcatttacctcaagtccatacccctcaccttccgagccatgttccaccagtactttcagatggggagccgtatccgcaagcactatctctccccacgggtgctcctctgcctgctgacgggccaattcgtcccgcccctcaaccgcaagaacctgtacagcctgcagtacggcatgttgcctgcgcgccgtgcgagcttccgtcagatgtgggacgccatcacggcaacgcagccgttgagcaagcccgtgccattcgtcgtgaacgggaggagatatccctcggggcttggtggtggggggcgaacgagataccaccactag

SEQ ID NO: 352 - protein, 778 aa, Colletotrichum graminicola
MHPLSVLSLGIFVAGYITARWDLVTRLYELAIFAWDYGVVTRAAKGFALLTFVYLLIFIPVERLATKEANLRSADMPENDGLMRIFWPTDIQRSDLPGVVVGWRNSTLDVFVVAILDDVDAGHVEFALKIGTLFRNPPHPVNSIYERCGHGAMHVLGLTNPSDAVVLDPSLFVATTTLAGVKPPRITCAKALSIQIILYDRPRPNRMQYISLNPISLALGNKEAPGLPPTEHMSEEEKQELKMKEQKRKLVEKLKLHTIIKRNPSPKEKALPKIVNQINWSWQLEQLLQKNISRIGTRPKRTLSVSERVVENVTTVRNFVWDLLILYVLPLVQWGFVYMLMGHRAVAELLLQILEFRLKDNYLALKDISATAQQVEIRLQQFCYWPMQYTTLRQRKNDWESVTTSHPDYIRFYNSLWLVANDVIIGIALGSYIIDNADWAANAISELLRVYTVEALQRSISWLMGWPAGLKLNKELALFLGDLFLWVIEYWSNCIAALQPVLPRIIWFIGFSSFAGASMPIAMFSDLLSGLTIHIYSFYLASARIYHWQLTILISLFHLFRGKKHNVLRNRIDSCDYDLDQLLVGTILFTLLFFLLPTVVVFYLNFAVARMVIISLKAVFDTLLSCLNHFPLFALMLRVKDPRRLPGGIRFELRDTHDYRLSNTSNEPPTSVIYLKSIPLTFRAMFHQYFQMGSRIRKHYLSPRVLLCLLTGQFVPPLNRKNLYSLQYGMLPARRASFRQMWDAITATQPLSKPVPFVVNGRRYPSGLGGGGRTRYHH

SEQ ID NO: 353 - DNA, 978 bp, Bipolaris maydis
atgtcaagtcgccaaccaaagggccactacaagaagcttctgtggttcaagcaaccctttcccgacaattacacggatgaggccacgttccttgaccacttgcagcgaaaccctaggctgcagccctatgagttctggtcgctcatgtccgatgcaaccgtcattgtgcagcatcttgcttcggtaattatcttttgctgctgcttcatagccatcattcacggtagagtgtcgcctgttgcagtagtcggatgggccagtatgtgcacagtactggcctgggtcttgtgggatcactggatgggccaggagttcaagacggttgccaatgtgcctttgacgcctacgtcggagacagacgaggtcgtgccacaagcctcacaagccctttcgcccagagccaagcagcgtctggcaactgctaaatccgccatactcatctatgcggctttgcttgggctcagcccgattctcaagtcgctcactcgctctaccacgagtgattcaatatgggccataagcgcatggctactgatgatgaacgttgcattctttgattacagcgcgggtacagatgcgcaactaccagcttcgatatccacaaactcagcgatgatggcatcggcggtgcttgcttcgcgtttgccatccaccactcatgtcttctcgttgactctattctccattgaggtattcggtctcttcccaatattccggcgccagctacgtgctaggtcaccatggggccatctcacgctgaccatggccctggtaacatgcgcatggggcagtctttttgttactctgacagggaacggccgcgccacatttatagccggcgccatcctaggggggattctcacattcctcagcatgggagtctgtagctggtggttgatcggtctacaaaagtacaagaacgagattcatggcccttgggatcccgctaggcctattatccgtcgacactgggattga

SEQ ID NO: 354 - protein, 325 aa, Bipolaris maydis
MSSRQPKGHYKKLLWFKQPFPDNYTDEATFLDHLQRNPRLQPYEFWSLMSDATVIVQHLASVIIFCCCFIAIIHGRVSPVAVVGWASMCTVLAWVLWDHWMGQEFKTVANVPLTPTSETDEVVPQASQALSPRAKQRLATAKSAILIYAALLGLSPILKSLTRSTTSDSIWAISAWLLMMNVAFFDYSAGTDAQLPASISTNSAMMASAVLASRLPSTTHVFSLTLFSIEVFGLFPIFRRQLRARSPWGHLTLTMALVTCAWGSLFVTLTGNGRATFIAGAILGGILTFLSMGVCSWWLIGLQKYKNEIHGPWDPARPIIRRHWD

SEQ ID NO: 355 - DNA, 1500 bp, Magnaporthe oryzae
atgcgtcgtacatataacatcgctatggttagcgacttcttcttcccgcagccaggaggagtcgagagccacatttatcagctgtccaccaaattgattgaccgtggccacaaggtcatcataatcacccaccaatacccagggaggaccggtgttcgatatctcaccaatggtctcaaggtgtaccatgtaccttttctggtcatgtaccgctcggccacattcccaaccgtcttttcattctttcccatattccgcaacattgtcattcgtgagcaaatcgacatagttcacggccatgccagcttgagcagtctctgtcacgaggcaattcttcacgggcgcaccatggggttgcgcaccgtcttcaccgaccactcgctctttggattcgctgatccagccagcattcttaccaacaaactgctaaaattcaccctgagtgacgtcgaccatgtcgtgtgcgtgagccacacctgcaaggagaacaccgtcctccgcgcctcactggatcctctgatggtatcagtcgttcccaacgccgttgtggctgagaacttcagaccagtcaactacacggctgctggcgagcagacaacaccgccgccgccgccaggtccccatgacatgattacgatcgtggtgatctcgcgtctcttctataacaagggcacagatcttctcacggccgccattccgcgcatattgggcagccaccctaacactcgattcatcatagccggcgatgggcccaagtcgattgacttggagcagatgattgaacagaacgttttgcaggatcgggttgagatgctgggcccagtccgccacgaggacgtgcgcaacgtcatgattcgaggccaaatatacctgcatccgtcgctgaccgaggcttttggtaccgtcattgtcgaggcagccagctgtggcctctacgtggtctgcacccaggtcggcggcattcccgaggtgctgccttcgcacatgaccgtctttgcacggcccgatgaggacgacctggtggcagcaactggccgtgcgatcgctgctcttcgttctgggcgcgtccgtaccgagctgttccacgaacaggtcaaaaccatgtactcatggaagaacgtggccatgcgtactgagcgcgtctacgatggtatttcgggggccatctccgaggccgagttctacggttatgacggcccagcaggaggtggacctggcttgccgagctttgccctaatcgaccgtctcaaacgttactatggatgtggcatatgggccggcaaactcttttgcctttgtgtaatcgtcgactacttgatcttcctattcctcgagttctggttccctcgagatcaaatcgacatttgtcccgactggagcagatcccataaaaggaaggctctgcggggaaccagccacactaatgggggtggtgtgtcaaggcagagtacagagaacagagaatacgatcaaggacgcatcaaagcacacattgcctga

SEQ ID NO: 356 - protein, 499 aa, Magnaporthe oryzae
MRRTYNIAMVSDFFFPQPGGVESHIYQLSTKLIDRGHKVIIITHQYPGRTGVRYLTNGLKVYHVPFLVMYRSATFPTVFSFFPIFRNIVIREQIDIVHGHASLSSLCHEAILHGRTMGLRTVFTDHSLFGFADPASILTNKLLKFTLSDVDHVVCVSHTCKENTVLRASLDPLMVSVVPNAVVAENFRPVNYTAAGEQTTPPPPPGPHDMITIVVISRLFYNKGTDLLTAAIPRILGSHPNTRFIIAGDGPKSIDLEQMIEQNVLQDRVEMLGPVRHEDVRNVMIRGQIYLHPSLTEAFGTVIVEAASCGLYVVCTQVGGIPEVLPSHMTVFARPDEDDLVAATGRAIAALRSGRVRTELFHEQVKTMYSWKNVAMRTERVYDGISGAISEAEFYGYDGPAGGGPGLPSFALIDRLKRYYGCGIWAGKLFCLCVIVDYLIFLFLEFWFPRDQIDICPDWSRSHKRKALRGTSHTNGGGVSRQSTENREYDQGRIKAHIA

SEQ ID NO: 357 - DNA, 711 bp, Leptosphaeria maculans
atgtccgccatcctgaagcgctttacttgtccacccgcgcaaacactacgaacattgcagcccacgccgtcaacgatccaatacacagtatcgacccgtcgcgtagcagatacatttccttcgatactcagccactattctggcatagctcttcgatttgttgtcggtctaatcgccgtactcatcctttggaccaaataccacacagcctatgagccagcttcagccctgttgcgctggacactaaacacagcatgggaaacacaccttatcgccctcgtacacaggtgtcaatggcgctatctggccccgctgtccctgtttcttctctttctagtcttcagacgaaactatactgaggagtctttgacgctgcttcgcggtctgggcatacaaacgagtacctcatccggtacatacctacaatccccgaccacacgcttcattcctacgaccagtatcaaagacatcttcatacacgaggccttcaagggattcgaggtacgcttttatctaggcattgtggtggaaggggaggaggatattgtcgttgtttttccagccttgttgccgcgacgggcgttgctggaggtggtgtggagaggggctagggcctgtttgtgggagagtggtggcgggatggcaaagaagagggaagatcaagggaagaagtgtcaagtgcaggtggcagagctggagggttattactaa

SEQ ID NO: 358 - protein, 236 aa, Leptosphaeria maculans
MSAILKRFTCPPAQTLRTLQPTPSTIQYTVSTRRVADTFPSILSHYSGIALRFVVGLIAVLILWTKYHTAYEPASALLRWTLNTAWETHLIALVHRCQWRYLAPLSLFLLFLVFRRNYTEESLTLLRGLGIQTSTSSGTYLQSPTTRFIPTTSIKDIFIHEAFKGFEVRFYLGIVVEGEEDIVVVFPALLPRRALLEVVWRGARACLWESGGGMAKKREDQGKKCQVQVAELEGYY

SEQ ID NO: 359 - DNA, 207 bp, Saccharomyces cerevisiae
atgagaccacgtgaccaaggctttttggttttagggtttacttactcggtactcctaattagtcttgctacattttactggttacgcaacaatgactctttcctgcactactggtgtgtattactgctatgccctgcgactctctggctgtgggccctcatagcctggtgtgacagtgaaatgttcgcaagtagtaaagatgaataa

SEQ ID NO: 360 - protein, 68 aa, Saccharomyces cerevisiae
MRPRDQGFLVLGFTYSVLLISLATFYWLRNNDSFLHYWCVLLLCPATLWLWALIAWCDSEMFASSKDE

SEQ ID NO: 361 - DNA, 1080 bp, Pyrenophora tritici-repentis
atgccgtctggttactactcaaagtcaacccccaatctaccaaccttggggtcgtctgacggtcacactggggatgaacatgtcttgacgtcgccgccaccatctgccacacgcccgggaccgagtcctctgtcgccagtttcaaatggtgctctctcagaagccgctgatgcagaggacaaccaagatgatgcgaaagactcggctgtgctagacgattctgacagcgaacattctggatacgaggatgagcaagcgcccggatcccgaccgctatacgcgtcgcgatcgtacagtcacataccacaaagtactgcgactgcgctctacccacccttttacaataggccacctaatcccctgccgccatctccctcgttgacatcgctcctccgccctgccttcagccgcccgacatcgagacctacaacaccagactcatccgatgtagaaggctcgatgaaagctgggtcgcacactactggcacgagcacgcctaccacgaaccttgcgaactcggcacggcatgcggcgacggttcctcgggcatcgccgaaagtgcctacatacgagtactatggcttcgccctgtacctgggaagttcggccgcattcctaatgtacatactctgggcatatgtgccggcgcccatgctgcaccaaatgggcatccattactacccaaaccgatggtgggcactcgcggtgccctgctggttggttgtactggtcatctacatttacgtggcgctagcaagctacaacacccgctaccttacgctgccattgagcagcattgagaacctcgttgacgaatgtgctcaggttgctgttgtggatcgcacaactggccggatagtacgtgatccggttatgctgacagacaagctacacgaacaggacaaggaaaagggcacgataggaagtgcaccacacagccgcaggagctcattttctgcatatcaatttagcgcatcgaaccatgtggactggaagagtttctggagcacgggcacagacgccgttatggacgtgccgataggcggggtctgtgaagtcctgtatgggaccgacgattga

SEQ ID NO: 362 - protein, 359 aa, Pyrenophora tritici-repentis
MPSGYYSKSTPNLPTLGSSDGHTGDEHVLTSPPPSATRPGPSPLSPVSNGALSEAADAEDNQDDAKDSAVLDDSDSEHSGYEDEQAPGSRPLYASRSYSHIPQSTATALYPPFYNRPPNPLPPSPSLTSLLRPAFSRPTSRPTTPDSSDVEGSMKAGSHTTGTSTPTTNLANSARHAATVPRASPKVPTYEYYGFALYLGSSAAFLMYILWAYVPAPMLHQMGIHYYPNRWWALAVPCWLVVLVIYIYVALASYNTRYLTLPLSSIENLVDECAQVAVVDRTTGRIVRDPVMLTDKLHEQDKEKGTIGSAPHSRRSSFSAYQFSASNHVDWKSFWSTGTDAVMDVPIGGVCEVLYGTDD

SEQ ID NO: 363 - DNA, 1299 bp, Setosphaeria turcica
atgtccctttcctcctttttccgcagtccagtcttggttttcaccacgtccatcatcttccgcgccgtctttctcatgtatggtctctggcaggatgcgaattctcccatgaagtatacagatatcgattactacgtcttcactgatgcggcccgctacatatcccgtagccagccgccttatgcacgagatacgtatcgctatacgcctcttttagcatggctcatctaccctacggtatggactggaaagttttggttttcttccggaaaggtcctcttcgccattggagacgtggctacgggatggatgatgtttcgcatcttgaaagagcacaagaaaatgactgatgagcgggccctgaaatttgcgagcatttggctgctgaacccaatggtggctaccatcagcaccaggggtagctctgaaggacttctgggtgtgtttgtcacagcactgttgtgggcggtgttggccaagcagataccgcttgctggtttcttgctaggattcgcagtccatttcaagatttacccgatcatctacgccgtttcgattgtcttgttcctggacgaaactcaattcaatactgccggagaggccaattcgcagtctcagtcactcattggccagatcaaagccttcctcaacccatccaggttgatgctggccttttacagtctcctcacatttgccagcttgaatctcctcatgtacagcatttacggctggccattcctcgagcatagctacctatatcacttgatccgcagcgaccaccgccacaacttctcgccctacagcacgattctgtatctcagctcttcaccaaagcccagtggcctacactcggccccgccatctttcggactggagcgactcgccttcctgccgcagctactactcagcgccgtgtttatcccgctagcactatccaaaaaggacctcccagacacgatgctcgcccagaccttcgcctttgtcactttcaacaaagtctgcacaagccagtacttcctctggtacatgatgtttctcccctactacctcccacaatccaccctgctccaatccccctcgattggtgttttcgccctgctatcctggatcgcaggccaagccgcctggcttttccaaggctttcaactcgaattcaacggcaactcgacttttgtcccggctctctggatcgccacaattttgttcttcatcattaacgtgggtattctgagtgtcattatcaacgacactaagcagaagccggttcaagcggttgtatcacagaagaagaagttgtag

SEQ ID NO: 364 - protein, 432 aa, Setosphaeria turcica
MSLSSFFRSPVLVFTTSIIFRAVFLMYGLWQDANSPMKYTDIDYYVFTDAARYISRSQPPYARDTYRYTPLLAWLIYPTVWTGKFWFSSGKVLFAIGDVATGWMMFRILKEHKKMTDERALKFASIWLLNPMVATISTRGSSEGLLGVFVTALLWAVLAKQIPLAGFLLGFAVHFKIYPIIYAVSIVLFLDETQFNTAGEANSQSQSLIGQIKAFLNPSRLMLAFYSLLTFASLNLLMYSIYGWPFLEHSYLYHLIRSDHRHNFSPYSTILYLSSSPKPSGLHSAPPSFGLERLAFLPQLLLSAVFIPLALSKKDLPDTMLAQTFAFVTFNKVCTSQYFLWYMMFLPYYLPQSTLLQSPSIGVFALLSWIAGQAAWLFQGFQLEFNGNSTFVPALWIATILFFIINVGILSVIINDTKQKPVQAVVSQKKKL

SEQ ID NO: 365 - DNA, 1524 bp, Colletotrichum graminicola
atgcgtcagcgaatcaccttcatccacaagccaggtgacggcgtcccacccgagtctctcgagatcagcgatgccggtgtcaaaggccccgacatcttgtccgtccgtgaagagagagtcacactggctctggaggagctcccatctgagctctcccagcttctcagtgagagtcacgagctgcacatcagatgggccagtccttgggcctatgacaccgtcggacccttggcttcgagggtatcgccgggccttcacctcttttataccccgaagagggatggggaatgggacggaacgaaactatgccaagaactgaagaaggcctttggcggcagcggctgctcatcgtccgagtccttcacaagtcttccccgtgaccggttctctcactcggctgctcttcaatactaccaaccgctagaggacctcgccgcattcacacagtacacagccgaacagctctgcccggcatcagacatggcctgcaaatcccgcgccgaggagctcaagacagcggcctctctcgatatatcctacgacacaatctcgcacgctcttaaagtcacggcccagtggcctcacggcaagcatagcatctccgtcgcctcgacgcccaatcaccgaaccgaagtcggtatcctcaccatcgacgccaccgcaaaccctgagccccatgagatcggtatgggcggcggcctcatcgtcatcggcgagcacaagaagccgtcgtccgtcctcttcaacgtgcctgcccgccaccggctgcacgcggacgcctcctctcgcccaagctccttctacgcaaagctccttgagccggcgggcctacacccaacgctgcagctcacgcttacttctgccaaaccgccaatcgatgacgcatactgcgccgtccatgcgcacctgacgctcccaaagacggtattcgccgaccgctaccagcttgccgatgacctcttcctgcaatccaagaacctcacagcactgcgctactccacctcgcccgtcgacctcgaggcgcctgcatatgccacgaagccgtggggttccggcgtcctgctcgagctcaggccgccggcggcagagaaggacgaggattggacggccgaggtgccgctccacctgcgctacctcgagccggccgccggcgggtacacggacgtcgaggtgccctatccagctgtgttctgggcgtgctcctccgaggagggcaccaagttcccgagcagccccttcgagagggtgaacttgggctacgacgcattgttcgggccgcggacggtgttttggcacgtcgatccgcggcctgctgcgggatcggtggctgagggcggcgaccggctcctaagcaccgtacgggtgccagtcctcgaggccgggcaggctgagtgggttcggggcggaacggcggccgcagtgatggtgggatttgcgtgggttatgtggagaatcattgcgactatttcgaagtcggggtaccgcaagggtgggggggcagtcgacgagaagaagaatcagtag

SEQ ID NO: 366 - protein, 507 aa, Colletotrichum graminicola
MRQRITFIHKPGDGVPPESLEISDAGVKGPDILSVREERVTLALEELPSELSQLLSESHELHIRWASPWAYDTVGPLASRVSPGLHLFYTPKRDGEWDGTKLCQELKKAFGGSGCSSSESFTSLPRDRFSHSAALQYYQPLEDLAAFTQYTAEQLCPASDMACKSRAEELKTAASLDISYDTISHALKVTAQWPHGKHSISVASTPNHRTEVGILTIDATANPEPHEIGMGGGLIVIGEHKKPSSVLFNVPARHRLHADASSRPSSFYAKLLEPAGLHPTLQLTLTSAKPPIDDAYCAVHAHLTLPKTVFADRYQLADDLFLQSKNLTALRYSTSPVDLEAPAYATKPWGSGVLLELRPPAAEKDEDWTAEVPLHLRYLEPAAGGYTDVEVPYPAVFWACSSEEGTKFPSSPFERVNLGYDALFGPRTVFWHVDPRPAAGSVAEGGDRLLSTVRVPVLEAGQAEWVRGGTAAAVMVGFAWVMWRIIATISKSGYRKGGGAVDEKKNQ

SEQ ID NO: 367 - DNA, 1389 bp, Leptosphaeria maculans
atgacaagcactggcttgggtccgtcagcaggacattaccgacgtctcgttggcttcttttgtctatggaaggctttactgcttggtcttgcagcattttgcccgggtccaggctacgatacctctgcatacattttatttgattctagtactacacgacatctcaatctagcaaatctgtcacacgctgatcagcttgttctcaatctttttcgttgggatgcactatactttgttgatgccgcggaccatggccaggtccatgaacagcaatgggccttcagctgggcttactcgcatctcctgagagtcgtgggccaatccttccccggcgctgtggagtgcccattacagtactacatcgtggctggaatcatcgtctccaatgtctgccacctcctttcagtacttgtcctctatcgtcttctcgccttagtgttggattcgcttcaacgccgtcgtgtcgcctttgtggcatccgtactacacatcttgacacctgcctctcttttcatgtctgcaccttatgctgaatccctcttctctctactcaactttaccggaatgctatgctatgtccagtcgaagcttgcagccaagtgcggacatgcatcgttcctggaggacgtttacaaattaagctctggtctgctcttcgcatcagccactctaatgagaagtaatggtctgctgagcggcttgatacttttgtacgatgtcggacgctacataccacttttcttgcccatacggctgaactatcataacatgagaagcattctggtcacatgtgtggccgggatgatcatcatatgtggcttcttgggcccccaatatgtagcatatcgagagttctgtggcagagagggcagctccggtcgtagagagtggtgcgacaaaagcatcccgagtatctactcgtgggtacaaagtcattactggaatgttggttttttccgctattggaccgcctccaatctaccactcttcgtcctagcagctccaatgctgtggcttttgattcaatcaagcgtaaatattctccatactagctttgagcaacagccacttcgaacacgcggatctacagtaaattgtgatcccacgcgcatggactcagcatgcgctgtggtcactgttccagagttagcgctcccgcaacttgtactcgccatagcagccgtcacgagctttcacgtccaaattgtcaaccgtattgcttctgggtatccgatctggtacataacaattgccgaaatgttaacccatggtcggcgcgtgaccccgaatcaaaagacattcctgaaggggcaaggagtcgtccggggaatgatcatgtatacactagttcagggcatgctttacgcgaatttcctaccacctgcgtaa

SEQ ID NO: 368 - protein, 462 aa, Leptosphaeria maculans
MTSTGLGPSAGHYRRLVGFFCLWKALLLGLAAFCPGPGYDTSAYILFDSSTTRHLNLANLSHADQLVLNLFRWDALYFVDAADHGQVHEQQWAFSWAYSHLLRVVGQSFPGAVECPLQYYIVAGIIVSNVCHLLSVLVLYRLLALVLDSLQRRRVAFVASVLHILTPASLFMSAPYAESLFSLLNFTGMLCYVQSKLAAKCGHASFLEDVYKLSSGLLFASATLMRSNGLLSGLILLYDVGRYIPLFLPIRLNYHNMRSILVTCVAGMIIICGFLGPQYVAYREFCGREGSSGRREWCDKSIPSIYSWVQSHYWNVGFFRYWTASNLPLFVLAAPMLWLLIQSSVNILHTSFEQQPLRTRGSTVNCDPTRMDSACAVVTVPELALPQLVLAIAAVTSFHVQIVNRIASGYPIWYITIAEMLTHGRRVTPNQKTFLKGQGVVRGMIMYTLVQGMLYANFLPPA

SEQ ID NO: 369 - DNA, 3009 bp, Zymoseptoria tritici
atggcgcgactcgggcacaggggattcctgggcattgcggtcttgttccacttgatttacatctactcgatcttcgacatctacttcgtcagtcccatcgtccggggcatgcgaagtcatgccgtggatgcgccagaagctccagcgaagcgattagtgttatatgtcggcgacggtctccgcgccgacaaagcattccaatacttccctgatccatcaaggtccacgaacgatacttcagcgcaacagccaggcccgttggccccttttttacgatcgcgagtcctcgaacacggcacattcggagtgtcgcacactcgtgtgcctaccgaatccagacccggacatgtcgctcttatcgcagggttgtacgaagatgtcgcagcagtcacgacaggatggaaaatgaacccagtcaatttcgacagtgtattcaacaggagtcggcatacatggagttggggaagtccggacattctgccaatgttttccaccggtgcggtgccaggaagagttacggatgctacatatggtcatgagttcgaggacttcagcaaagatgcattggagttggactattgggtttttgacagggtcaagcagttgttcaaggatgccgaaatggatgcggaactcaatgcacagttgagacaggacaagctggtgttcttcctacacttgctcggcttggacaccaacggtcatgcgtatcgtccttactcccaagaataccttcacaacatacaaatcgtggaccaaggtgtgaaggagatcacagagcttatcgagaagttctatggagatgatcagacggctttcgtattcaccgcagaccacggtatgagcgattggggcagtcatggagacggacatccggataacacacgcacccctcttatcacatggggatcggggattgctaagccggtgactgtcagcaacggcaaggctcctggacatgaggaccaattctctcacgactggcatctggaccacgtcaagcgaaatgatgttcatcaggccgacgtcgcagctttaatggcgtacctggtaggtctggaattccccgtcaattccgttggagagctaccgttgccctttctcgatgccagtgatgaggagaaggcgaaagcactcttgaccaatgccaaggagatcttggagatgtatcacgtcaaagagcgcgaaaagaaagccacggtctttcagtacaagccctactcgggattcgctgatgccgaacacagtgtggacagccggctgaaagccattcagcgactgatcgatgcaggcgacttcaagcaagcgatcaaccagaccgacgagctcattcagctcggcctccgtggacttcgatatctgcagacttatgcatggctcttccttcgaactttggttacagcaggctatctgggctggatcgctttctgtttcacgactgccatcgatctacacatgctcgaaggaaagattgaagcctccaggccgactgccggcatcattgctttctcctcgatcttggtaggacttttcagtctgctcctcgttcaggactcgccgataacatactatgtctatgccatcttcccagtcatgttctgggaggaagtcttcgcgcgtcgacaagcgttggtccaaggccgaaagaagctcttgtcgaaggtcgggaagcgagatgttaccaaactggcgctcaacgctgtcgcctatgtcgccatgctggaagtcatggtgcaaagctattatcaccgcgagatctacacgatcagctacattctggcgattgcatggccgttcttttacggctcagaatttgtcaagaagaacgccttgctgtgtggaacgtgggcagcagcctgtgcggcaatgagtgtgttcaccttgctgccggcgttgaaaattgaggattcaaacctgatccaagttggtgggttcttgatcctcatggtcggtgtgctatacattgcattcgagaagcatctgcttgtcaagactgcgccgaaaggcaatgacaaggcagtgggcattgcagatgatggcctttcaagggcgcttctcggagttcaagtgggtctggtcgcgctggccatgattgtgacacgatcgagtgtgacttctctccaagcaaagaagggactgccgctcggaacgcaagtggtcggctggtttactctcgtcgcttcgctcaccgtcccattccttcacgccctccggccacgcgaccacttcctccaccgcttggccatcattttcctggccttcggtcccacattcatcatcctcaccatctcttacgagggtctattctacttcgccattgcgacgaccctcatctcctgggtgcgactggagcaccgcattcatcagaagtcttttggtgccctcccgtcgacaccgaacaaacaaaacggcatgccgaaggatctcgggtcacctcttcaacctgctctgctcgctgctcaggctcgcgagtcctcttcatcataccgcgccctcactctttccgacgcccgcatttgtctattcttcctcttcatcctccagtccgccttcttttccaccggcaacatcgcctccgtctcgtccttctcccttgatgcggtctaccgtctaatccccatcttcgacccgttctcacaaggcgcgctcttgattctcaaactcctcgctcccttcgctctggtctcggcaaacctcggaattctgacgaaacgactacgcctacggggtggaagcctgttcgccgtggtcatgggcatcggcgactatcttactcttcgcttcttctgggaagtcagagatgagggcagttggctggagattggagaaagcatcagcatgtttgtcattgcgagtgtgttgtgtgttttcgtcgcaggtctggaggcgctgagcgagctactggtcagaggcgtggagtttagggaggtcgtggaaaaggttgagagcacgatcaaggccaatgggaatggcagcgcgagtggcaaaggtggaaaaaagcgaaggtga

SEQ ID NO: 370 - protein, 1002 aa, Zymoseptoria tritici
MARLGHRGFLGIAVLFHLIYIYSIFDIYFVSPIVRGMRSHAVDAPEAPAKRLVLYVGDGLRADKAFQYFPDPSRSTNDTSAQQPGPLAPFLRSRVLEHGTFGVSHTRVPTESRPGHVALIAGLYEDVAAVTTGWKMNPVNFDSVFNRSRHTWSWGSPDILPMFSTGAVPGRVTDATYGHEFEDFSKDALELDYWVFDRVKQLFKDAEMDAELNAQLRQDKLVFFLHLLGLDTNGHAYRPYSQEYLHNIQIVDQGVKEITELIEKFYGDDQTAFVFTADHGMSDWGSHGDGHPDNTRTPLITWGSGIAKPVTVSNGKAPGHEDQFSHDWHLDHVKRNDVHQADVAALMAYLVGLEFPVNSVGELPLPFLDASDEEKAKALLTNAKEILEMYHVKEREKKATVFQYKPYSGFADAEHSVDSRLKAIQRLIDAGDFKQAINQTDELIQLGLRGLRYLQTYAWLFLRTLVTAGYLGWIAFCFTTAIDLHMLEGKIEASRPTAGIIAFSSILVGLFSLLLVQDSPITYYVYAIFPVMFWEEVFARRQALVQGRKKLLSKVGKRDVTKLALNAVAYVAMLEVMVQSYYHREIYTISYILAIAWPFFYGSEFVKKNALLCGTWAAACAAMSVFTLLPALKIEDSNLIQVGGFLILMVGVLYIAFEKHLLVKTAPKGNDKAVGIADDGLSRALLGVQVGLVALAMIVTRSSVTSLQAKKGLPLGTQVVGWFTLVASLTVPFLHALRPRDHFLHRLAIIFLAFGPTFIILTISYEGLFYFAIATTLISWVRLEHRIHQKSFGALPSTPNKQNGMPKDLGSPLQPALLAAQARESSSSYRALTLSDARICLFFLFILQSAFFSTGNIASVSSFSLDAVYRLIPIFDPFSQGALLILKLLAPFALVSANLGILTKRLRLRGGSLFAVVMGIGDYLTLRFFWEVRDEGSWLEIGESISMFVIASVLCVFVAGLEALSELLVRGVEFREVVEKVESTIKANGNGSASGKGGKKRR

SEQ ID NO: 371 - DNA, 1842 bp, Fusarium graminearum
atgtcgtctgcaacagtttcgaggaaatctctagatgaggcccggaaccagagaaaccgctcgtttttcttgcgtgacattattgtcattcgtctcatcaatgcttggtggatagccacctttttccagccagatgagttcttccagtcccttgagccagcttggaacctggcttttggatctcagagtggtgcatggttgacatgggaatggcaacaccaacttcgcacctctcttcacccagctctcttcgcaggcgtctatctcgtcgccgacttcatctccagccacatcctccctgtaggaatcctccgcgctaccatcctcgtcgctgttccccaagctctccaagctgtgattgctggcctcggtgactggtacacctggcagctggctgtttccatctacggagccaacagcaatgtctccttcttcgccctctttctgcaaatcttcaacccttggcaatggtactgctctacacggaccttttcaaactctctagagatgactcttactgtcatggcgatgtattactggccctgggagcttctcggcgtggcgcagacgacaaaggaaaaccccaagcctgcccctattctcaagagtctctggtcacttcgtgcctctctttgtctcgcggctttagctgtggtccttcgacccaccaacatcttgatctgggctaccattgtcctcttcactattacccggatctcacttcaggggccttcacctctcaccctttcaacagttgttacactgatccgtgaggccatctggtgcggttctctgatcctagccatatccgctgcttcagaccgttggtatttcggtttctggacatttcccgcctataactttctttattttaacctatcaaagtcccttgccgtcttctatggccgaagcccgtggcactattattttctccaaggacttcccctcatttgcaccacaagccttccttttgctgttgcctctctttacaagccaactgcacatgcgacgtcgacacagcaattcaatgtgcttaaaacattagcttacacagttttcacaactgttggtgccttgtcgcttatcactcataaagaagttcgcttcatctatcctctcctcccagcactcagcatcctcgctgctccttacactgcctcattctttacatcccaaccaagtcccaccacgaacaatccccgtccgcaacctcagatccgcaacaagcgctatcttttcgtcgcccttggtgtcaatatgtttctcgcaggctacctatctttcttccaccagccagctcccctcaatgtcctcgcctacctccgtcatgagtacgagcgcatccatccagactctgttcaactggcccaaacttctcatttctctgctatgcccgagaatgaagacgagctctttgctttgttcctgatgccttgtcactctactccttggcgttcacatctaatctaccctggtctgcgagcttatgccctcggttgcgagccccctcttcatactgagccaaacacccccgagagagataactatcgcgacgaggccgatcgattctacgatgatcccatccctttcctcacctccgagctattcagtccgaccaaggccctcactgttcctcgttatatcgttggctttgagagtattgaaccatggctgcaagaattcgtacagacttttgaggcgcagtctcttggcttgacccaagtgcggcctgtttggaaagggtttaatggtcttttcaacgaagattggcgacgttcaggcgatatgattgtttgggacactggcgtttatgataatgcaccccccacaaaggaactataa

SEQ ID NO: 372 - protein, 613 aa, Fusarium graminearum
MSSATVSRKSLDEARNQRNRSFFLRDIIVIRLINAWWIATFFQPDEFFQSLEPAWNLAFGSQSGAWLTWEWQHQLRTSLHPALFAGVYLVADFISSHILPVGILRATILVAVPQALQAVIAGLGDWYTWQLAVSIYGANSNVSFFALFLQIFNPWQWYCSTRTFSNSLEMTLTVMAMYYWPWELLGVAQTTKENPKPAPILKSLWSLRASLCLAALAVVLRPTNILIWATIVLFTITRISLQGPSPLTLSTVVTLIREAIWCGSLILAISAASDRWYFGFWTFPAYNFLYFNLSKSLAVFYGRSPWHYYFLQGLPLICTTSLPFAVASLYKPTAHATSTQQFNVLKTLAYTVFTTVGALSLITHKEVRFIYPLLPALSILAAPYTASFFTSQPSPTTNNPRPQPQIRNKRYLFVALGVNMFLAGYLSFFHQPAPLNVLAYLRHEYERIHPDSVQLAQTSHFSAMPENEDELFALFLMPCHSTPWRSHLIYPGLRAYALGCEPPLHTEPNTPERDNYRDEADRFYDDPIPFLTSELFSPTKALTVPRYIVGFESIEPWLQEFVQTFEAQSLGLTQVRPVWKGFNGLFNEDWRRSGDMIVWDTGVYDNAPPTKEL

SEQ ID NO: 373 - DNA, 1551 bp, Bipolaris maydis
atgtggcggagagtctactttctcctcgttctagtccgcatttactttgccctgtcgcccagttacctgcaccctgacgagaacttccagggcccagaggttgtcgctggacgcgtcttctcctaccccgtccacgaaacatgggaatttacctcggaccaccccatccgcagcaccttcccactatggcttgcatacggctggcccatgtacatcctgcgctggctatgggagggctccggatatgacgtttcgccctcggtcgtctactggacactgcgcctgctcatgctgtcgctgagcgtcgtcatggaggactgggcaatccacgagttggtcgcgtcgccccgcgcccgacgcatcgccgtcgtcctggttgcatcctcgtacgtgacatggactttccagacgcacaccttttcaaacagcctcgaaacactactggtgctctggagtttggttttgatccagagaatcactggcgataagaaacgctccggcatactagcctcgtccatcttgggcttcatggccgtcgtcggcatcttcaatcgcattacctttccagcatttctggttttgcctgccacaacactgctaccgcacttccagcgcaagccattttcgctagtcttcttggctacatttgctcttgccacagtcttccttgccgtctgtatcgatacggccttttataccccaggcgaattcaccttttcaaaagtctttactactcccgtcattacgcccttcaacaacttcctctacaactcgcagtccgagaatcttgcccagcatggcatacatccgcggtatcagcacttcctggtcaaccttcctcaactacttgggcctgccattccactcctgttcttcttgcgcaaagcgcacatcaccatgaacctgatatcagctctgtctggtgtcgctctactcagcatcttcccacatcaagaggcgcgcttcttattgcccgctgtacccttggtcctgtcctcgatacgcgtaccgaacctgccctttaaaaagccttggatagcaacgtgggtcgtcttcaacgtagccttggggttattgatgggcgtgtatcatcagggtggcatcgtgcctgtacagatcaacatcgccaagaccaacgaaaccatcagccatgccttttggtggaagacgtacagcccgcccacctggctgttgaacggcaagaatgaagaactcaagactgtggatttgatgggctgccctggtgagcagatgcttgaaagagtaaaggaagcgctcccaccatgtcggactcgaaaacccccacgggtcgaggatcaaggtgctacatatcttgtagcaccacggtctgcttacttcttgaagccataccaagacgcaactaagcagaatgatgtccggctagaagaagtgtggagctaccgacagcacctcaaccttgacgacatggattttgccgacgacggtgtttggaacaccatcaaccgtgttattggcgatcgaggcctggtagtgtggaaggccactcgtaattgctcgactctcctttag

SEQ ID NO: 374 - protein, 514 aa, Bipolaris maydis
MWRRVYFLLVLVRIYFALSPSYLHPDENFQGPEVVAGRVFSYPVHETWEFTSDHPIRSTFPLWLAYGWPMYILRWLWEGSGYDVSPSVVYWTLRLLMLSLSVVMEDWAIHELVASPRARRIAVVLVASSYVTWTFQTHTFSNSLETLLVLWSLVLIQRITGDKKRSGILASSILGFMAVVGIFNRITFPAFLVLPATTLLPHFQRKPFSLVFLATFALATVFLAVCIDTAFYTPGEFTFSKVFTTPVITPFNNFLYNSQSENLAQHGIHPRYQHFLVNLPQLLGPAIPLLFFLRKAHITMNLISALSGVALLSIFPHQEARFLLPAVPLVLSSIRVPNLPFKKPWIATWVVFNVALGLLMGVYHQGGIVPVQINIAKTNETISHAFWWKTYSPPTWLLNGKNEELKTVDLMGCPGEQMLERVKEALPPCRTRKPPRVEDQGATYLVAPRSAYFLKPYQDATKQNDVRLEEVWSYRQHLNLMDFADDGVWNTINRVIGDRGLVVWKATRNCSTLL

SEQ ID NO: 375 - DNA, 3192 bp, Fusarium oxysporum
  misc_feature: Fusarium oxysporum f. sp. cubense
ctaatcggcccatccgaacacctcgccaagggacaaggtgttactacgcaggccagtcagagtgacgagaatagtcaccagatcaagaacgagtaggacagtgctcgcaagcatgaagcgagggctgaagacgcggtagagcatcaggtgacgacgcagccagccagcccagctcatagtagccagggcttcaacggcatagtagatgatgaagacgccaatgccgcgggtggctgtctctaaaactcccttctgcttgggaccgaccttccacagagcgagtagtggtacagacgcagcagcgatgatctggcccgcaaagctgttaagaataaccacgatgggggtccaagggtagcggatgctaaagagagggataaaagcgctatcccactgaatgctggacaatacagcctggtggccagtcttgaaatagtagaagtttccgagtacagcaagcatgatgggcccgatggggctggtcttgagctcgttgagatccaaaagctcagccagggtaagaatctgccagaacataagagcaagggcaccaccgcccatgggcttcgaaaggaggaagcatcccaaaagaaggttaagcgggagcaacaagtagcgagcaccaatagcgttaccatatccaataatagtaacaacaggtcgaccgccagctccagcggattgaaggagggagacgcagggaggcgcccaaacaaaagcagtgcttccggcaatgaaggcgagagcgaggacaatctgggctagataaactccgatggtcttgggggttccttcggcgagacgtccctcgagccagccgccattgtcagcggcatcgataacccagtacaaggctgacaaaaacaggcctccacggatgacatagccaatccaagttggggcaagaccctcatacgacctgcttgtgacgaggaacgatttgataatagctggaagaataaggcacacggcaaaaggaatggcaagctgccaaattgcagaggttgaagaggtcgaagaggcgtagtacgtagaagtgcagtagggcatctgctcctcgcgacaaagcttggaatacgaggcgagacggccaagaatgatgaaggcaacagagtggtaaatgcccagatatctctcccgtcgagcctcaatgcggaatgcagagacggcactggccacaccaaaagtggtaataaagaagagaagaatcgaatcttcccagatagtgtaggagttggaagcaaatccgatcgattggctaacagtgaagattacagccaaccaaccccagaaagtcgaagggaagacattgagaatagtcctacctgcatcatgcagggaagagctgagaccaaccatgaagagcaccgcaacgagagcagcaaggccctcgataggctgctggcgatacaggcctacacccgtaagaacagagacagtaaagagaatcttggggtcccaaaggcccttgagaatctgcttgtgcaagacttccgcggtctcaggctcgttctccttgaaagccatgagttccaacttcttctcggcatagtcaagctcggcgtcattcataataacgtactcatcttcctcctctcgagaagagtacatcaagagcaagacgagaccaacgccaaagacaacaatacccatgatcatacgagaaacatcgaaacgtgcccagaggtccttgcagacagacagagtagtgtcctggaacttggtgaaggcaacgtaagcatcgcgatcattcttggcaatggcgcgagcagcctcccaaagagcagcgggagactcggctccttcgccctgagtcaggcctcgagccttgtggtaagatgcctggtatctctcaatcccagctgcagcaacacgcgaaacagcgttgaggttacgccagtcgttgcccttagtaccagcaaacgcctcctcaattggtcctcccaggttattgaagggaataggaataccaagaagcagcgcgagggtaggaacaagatcaatctggttcaccggtcgaaccttggcgttagggggaggaatagcaaagtcggaagaggttctgccgaagaagggcttctttgagtacatccagagagcagcctcaacttcgtcgtcgctctcaccaccgtgatcacccttgctgtccataccgtgatctcccataacaataagaagtgtcttgtcatcaatgctctcgacaagcttgcggataaactcgtccatctggcgaagcttggctcccatagcagggtgatcaggtccgtatcggtggccagcatgatcaacaccaagacaatgtccaataaggagatcccattcgccctttcgctccttgttcaatagcgggaagatgttgtcaataacgccattatcaacagtgtgaagatcccagacgttgaagctgtcataggccttgctaatattaggctcgaagtaaccagggaagagagaccaccatgtatcgtcgccaaggtgagcaatcttcttgccagcgtccttcagctgcatcaacaagttgtcctcctcgatagccgcgccagcaaagttgcttccaacatcaacaaaagtaggcaatgttcccgtcgtgagacccttgagtctctgcatcgtcgcggtcggaggatcagcgataaaagggcgaaggaaggcattctggggcgacttgacggctgtctcgtagaggtaggggaaagcattgtggaagtgctgagcttgcgccggatcttcgggaacagtaaagtcgtatcgaagcgcgtcaattagaacgacaacggctctgtcgaacgatttagggtgccagcaaccgcgatcgacattcaatgagcccttggtgttctcaattggaggcagtgtgcagttcgacttgtcctccagcactagccgtgtcagcaagaaaccgcttgtaaagagccagatgccgagcgcgtggatagctagcaagacgacccaaaaggcagcagtccaccgccagcgcttctcatatgtcttctgccgtctcttgtcgagcgcctcgcgtcgtcgctccagaacctctacgttctcttcggcgggagggagtccgaattttgcattagcagcttgttcagcacgagctctttcagctttagcccattgttccgcaatcttttgatgttcagtttggggaggctgctgctgagccttgggcttagcctttggcttttgtggcat

SEQ ID NO: 376 - protein, 1063 aa, Fusarium oxysporum
MPQKPKAKPKAQQQPPQTEHQKIAEQWAKAERARAEQAANAKFGLPPAEENVEVLERRREALDKRRQKTYEKRWRWTAAFWVVLLAIHALGIWLFTSGFLLTRLVLEDKSNCTLPPIENTKGSLNVDRGCWHPKSFDRAVVVLIDALRYDFTVPEDPAQAQHFHNAFPYLYETAVKSPQNAFLRPFIADPPTATMQRLKGLTTGTLPTFVDVGSNFAGAAIEEDNLLMQLKDAGKKIAHLGDDTWWSLFPGYFEPNISKAYDSFNVWDLHTVDNGVIDNIFPLLNKERKGEWDLLIGHCLGVDHAGHRYGPDHPAMGAKLRQMDEFIRKLVESIDDKTLLIVMGDHGMDSKGDHGGESDDEVEAALWMYSKKPFFGRTSSDFAIPPPNAKVRPVNQIDLVPTLALLLGIPIPFNNLGGPIEEAFAGTKGNDWRNLNAVSRVAAAGIERYQASYHKARGLTQGEGAESPAALWEAARAIAKNDRDAYVAFTKFQDTTLSVCKDLWARFDVSRMIMGIVVFGVGLVLLLMYSSREEEDEYVIMNDAELDYAEKKLELMAFKENEPETAEVLHKQILKGLWDPKILFTVSVLTGVGLYRQQPIEGLAALVAVLFMVGLSSSLHDAGRTILNVFPSTFWGWLAVIFTVSQSIGFASNSYTIWEDSILLFFITTFGVASAVSAFRIEARRERYLGIYHSVAFIILGRLASYSKLCREEQMPYCTSTYYASSTSSTSAIWQLAIPFAVCLILPAIIKSFLVTSRSYEGLAPTWIGYVIRGGLFLSALYWVIDAADNGGWLEGRLAEGTPKTIGVYLAQIVLALAFIAGSTAFVWAPPCVSLLQSAGAGGRPVVTIIGYGNAIGARYLLLPLNLLLGCFLLSKPMGGGALALMFWQILTLAELLDLNELKTSPIGPIMLAVLGNFYYFKTGHQAVLSSIQWDSAFIPLFSIRYPWTPIVVILNSFAGQIIAAASVPLLALWKVGPKQKGVLETATRGIGVFIIYYAVEALATMSWAGWLRRHLMLYRVFSPRFMLASTVLLVLDLVTILVTLTGLRSNTLSLGEVFGWAD

SEQ ID NO: 377 - DNA, 2556 bp, Puccinia graminis
  misc_feature: Puccinia graminis f. sp. tritici
atgactcttccccggcaagacaaacagcggaccacagccagactcaagatcatcctgctcatcaccagccagcttatcggagcaggactattcgccagaggtttcttccctgcacacaagccacccagcggctatggagcgccaccacacccgacgggaaaggcaccgttcgacagactggtctttgttctgatcgatgctctgcgaagcgattttatgtttggtacggactccaggatgaatttcactcaatcgctcgttcgggatggaaaggcacttccatacactgctatcgctcaagcgcctactgtaaccctaccacgacttaaggcaatgaccactggcatgaatccccaattcctggacgcggtcttgaacatcgctgattcaactgatcagggtgctctcctagaacacagtgactcttggctacgtcagctcctgttttcttctcaagtggcttcaccaaccagcccactcgtcatgcagagaaaggcaatattctatggcgatgatacctggctgcgtctcttcccctcttcctggtttgcggaggtggatggcgtctcaagtttttatgtcaccgacactgagattgtcgactataacgtcaccagacatctcgatcacgcgctctcagaaaaacagcaacaggaatgggatatcgccattctgcactatcttggcttggaccatgttggacatttgggaggctcaaaatctatcttgatgggccccaaacaggaacaattagaccttgctatctcccgcattttcgatggcatttcaaagcatgacctccgatcaaaaaagaaaacacttcttcttgtcgccggtgatcacgggatgactgatgctggtaaccacggcggatcatctaaggaggaactgtctacagcgcttttactcgcttcaccttccttcaaccgcgttgggtcacttagtgctcaaaaggacgagcccgagagagtacagcaggtggacatcgtgccaacccttgccatgcttttcggtactggaatacctcccgctagtataggagttgctatcgaatcagcccttgagttatcttttggtgatcagaaaccccacaatgtgcacctcgaggctgcgttgagaaatcatgcagttcaattgaccactttactccagcaagtatttggagggctctccccagtcaaagctttcttgcatcttgacgatcttggaaccgaaaacgaaaacttggaagctatcatcagccggttggatgttgatcgagtcagaactattctccacaggtctcaacagtatcttctgactcgattctcgggttaccatctgccaagcatggttctgggcctaatctttttgacgattgcggtcgttggcttcatatttgaagccttccgggggcgtggaaggcgcttgaataatcgggagatcatggtcgtcgttctagcagctgtccaactcgcgagcttcggatcgacgagcttcattgaagaggaacatgaagcctggttcttcttaggcgcctcctcactctccatcctcgccttcttagccccaactactaggaagtatcattatctccttggagtcgtcctcattcgagtcttgcggggctggtctcacaatggacagaaagccggtgtcgacaatagcatttccaactttgtacatggaaaaccatggttatgtcatctgctagaccctctgggggtctattacttggtttcaagtcagacccgaagtggcccaggtggtggtcattatagttcgatgggaatgctactgattattggcgcaggtgtcttcagtctgacgccgatggatcggccgtttctctatctgagcagggacattggagtgttacaggatagggagactcggccgcgattactgtatggcctgttggtctctggcttaggcctcagtttctttcgggatatgtctaaacaatcgttccggggagcattgcggatcgcgatcctggtcctcttgcgatcgctgactaagatggaaaactatccggtcctctggctttcctttttcgctggtgatctgtgccattttttgacgagcaatataaagagcattgatagtcgggaaggtgaagttgagcaggaggggccgatcctctcgacttggatccaattggtcttcttcaaatccacattctttgccctgggaggctcgaattcgttggcaacggtggatctctcaaatgcatacaatggattacgatccttctcattaccgatggtgacgctactgacgttcctgtcgaacttctcagggtcgatgatcgttgggctgggagggctaatccagtcatcgatgaggagggaagaaacaggaagggaagagattggatgtcgacaggcgacgacgctcgtccgctcggcctactttagcctccacttcttgctcatctcgatcctcagtactcacttctcagatcatctcttcgtcttctctgtcttctctcctgctgtcctctacgcgtttgtctggttctttggcttccatactcttctatctctcttggagatcctctcttcctttctctaa

SEQ ID NO: 378 - protein, 851 aa, Puccinia graminis
MTLPRQDKQRTTARLKIILLITSQLIGAGLFARGFFPAHKPPSGYGAPPHPTGKAPFDRLVFVLIDALRSDFMFGTDSRMNFTQSLVRDGKALPYTAIAQAPTVTLPRLKAMTTGMNPQFLDAVLNIADSTDQGALLEHSDSWLRQLLFSSQVASPTSPLVMQRKAIFYGDDTWLRLFPSSWFAEVDGVSSFYVTDTEIVDYNVTRHLDHALSEKQQQEWDIAILHYLGLDHVGHLGGSKSILMGPKQEQLDLAISRIFDGISKHDLRSKKKTLLLVAGDHGMTDAGNHGGSSKEELSTALLLASPSFNRVGSLSAQKDEPERVQQVDIVPTLAMLFGTGIPPASIGVAIESALELSFGDQKPHNVHLEAALRNHAVQLTTLLQQVFGGLSPVKAFLHLDDLGTENENLEAIISRLDVDRVRTILHRSQQYLLTRFSGYHLPSMVLGLIFLTIAVVGFIFEAFRGRGRRLNNREIMVVVLAAVQLASFGSTSFIEEEHEAWFFLGASSLSILAFLAPTTRKYHYLLGVVLIRVLRGWSHNGQKAGVDNSISNFVHGKPWLCHLLDPLGVYYLVSSQTRSGPGGGHYSSMGMLLIIGAGVFSLTPMDRPFLYLSRDIGVLQDRETRPRLLYGLLVSGLGLSFFRDMSKQSFRGALRIAILVLLRSLTKMENYPVLWLSFFAGDLCHFLTSNIKSIDSREGEVEQEGPILSTWIQLVFFKSTFFALGGSNSLATVDLSNAYNGLRSFSLPMVTLLTFLSNFSGSMIVGLGGLIQSSMRREETGREEIGCRQATTLVRSAYFSLHFLLISILSTHFSDHLFVFSVFSPAVLYAFVWFFGFHTLLSLLEILSSFL

SEQ ID NO: 379 - DNA, 2571 bp, Colletotrichum gloeosporioides
atgtcctttcgctatggcccgcgttttctgaccacccaactcactatcgccaatgtcttgattcccgtggcgattctcatattcgcgactggtttctttccatacaagcccgtgcttccaggtctggctcgttatgagaccctggagtatggcccgccaccaaaggcgccctttgatcgactcgttttcatgctcgtcgatgcattgcgaagcgattttgtttatgcggatggtactggattcacatacacccaagagttgattcgcaatggtgctgctcttccctttactgccaatgccaggtcaccgaccatcactatgcccaggatcaaagcaatcaccaccggctccatcccgtctttcttggatgtcatcttgaactttgatgaggcagacacgtcttcaactctcgccgcccaggacacgtggctggcgcaaatgaaggccaaacagtcgggaaagctggtcatgtatggagacgacacatggctcaagctgttcccagagacctttgaccgcgccgacggcacctcgagctttttcgtttcggactttacggaggtcgacaataatgtcacaagacacattgacaccgagctggagaaggatgattggaacacactggtgttgcattatcttggtctcgaccatattggtcacaaatcgggacctcgaagcccacacatggtccccaaacaacaggagatggacgacattgtcaagcatctcttccaggccatggagacatatgatcacatgtcttcaactttattggtactgtgtggagatcacggcatgaacgacgcgggaaaccacggcgcctcatcccctggagagacatctcctgcccttgtcttcatctcaccgaagctcaggacactacagcgcagcctgaactcgcctgtaaagttccaggaggacttctcgtactacaccaaggtcgagcaatccgatctcgcgccgactctggcggccttgctagggtttcccgtgccgcagaacaacttgggcgccttcattgccgatttcctcccattctggtcgaataaaaacgatcaaatccagttgcttgttcgcaatgctcggcaaatcctgaacattgttacggcgacgtttggcacgagcatgttcgatactgagtcgtcgtcaacacaaaaggcatgcgcggatccccaggatgacgcacaagaactggcgtgcgaatggcatagagtcaatgacgggctcaaggccatgggaggcagtgagcagctggatcaagcctggctcagggccatgtccaagtggttgagtaaagctcaggatctgatgagcaccatggctagcaattacgacatgggcaggctgcacctaggcgaggccctgatggccctgatcacttgctccctgctatttgctgtcacgacaagtctcattcccctggtagtcgtctccatttcctatggcattatgatgtttgccagcagctacgttgaagaggagcaacatttctggtattggttcacgtcggcctggtttggctcactggccatcaagaacatgcagaccacccacaagcctctgcagaccatcggtctatttctactcgcctcagcagccaccagactggtgcgtgggtggaatcagacaggacaaaagcatgctggcgaacccgacattgtcaagacctttgtcacaacaaatccacccctactctggacgctcgtgggcgcaacttacctcttgaacttttctcagctaacgagaagactccgtggcatgccggctgtcgcatctgccgcagcctccggcatggtggtgctctcggccttctctttcaagctagctttcacgcatgaagactcgccagagcttgtgaccggcgttccggccgccatcaacgtcgctctccaaggcctgaccctcgtgaccagagctagaatcgttttcgttggtatcggtgcactcgcagggtactctacttacattgccctctccaaaccaagtgaggcggctcagacagcaaaacttctccaccacctcatcaccctcttggtggcaacccaatcccgcgtaacaaatatccctctgcttctcctcttcaacgttcagctagccttcatctcatctctcggcctcgatctccccacgctatctacgtcctcaatactgctgcaattcacatccttcttcgctttcggtggcacaaacgcaatctcgtccgttgatctgtcgagcgcctacaacggcgttgcgggcttcaacgtcgtcgcagtgggcatcctgacgttcgtcagcaactgggcagggccagtatactggacctccgccacaaacctactcctcctccgataccgcaagcttcacaacagccgtaacgtcttcctgcagcatgtaggccacctgacgctgttcacggcgtgcagcgttctcttcgtcatggttgcttgcgaggttctcaggacccatttattcgtctggaccgtcttctcgcctaaatatctgtacagcatggcgtggagcatcgggcagcatttggccatcaacgtagcagttgctggcttgttgtacaagctaggtgcgacgtactga

SEQ ID NO: 380 - protein, 856 aa, Colletotrichum gloeosporioides
MSFRYGPRFLTTQLTIANVLIPVAILIFATGFFPYKPVLPGLARYETLEYGPPPKAPFDRLVFMLVDALRSDFVYADGTGFTYTQELIRNGAALPFTANARSPTITMPRIKAITTGSIPSFLDVILNFDEADTSSTLAAQDTWLAQMKAKQSGKLVMYGDDTWLKLFPETFDRADGTSSFFVSDFTEVDNNVTRHIDTELEKDDWNTLVLHYLGLDHIGHKSGPRSPHMVPKQQEMDDIVKHLFQAMETYDHMSSTLLVLCGDHGMNDAGNHGASSPGETSPALVFISPKLRTLQRSLNSPVKFQEDFSYYTKVEQSDLAPTLAALLGFPVPQNNLGAFIADFLPFWSNKNDQIQLLVRNARQILNIVTATFGTSMFDTESSSTQKACADPQDDAQELACEWHRVNDGLKAMGGSEQLDQAWLRAMSKWLSKAQDLMSTMASNYDMGRLHLGEALMALITCSLLFAVTTSLIPLVVVSISYGIMMFASSYVEEEQHFWYWFTSAWFGSLAIKNMQTTHKPLQTIGLFLLASAATRLVRGWNQTGQKHAGEPDIVKTFVTTNPPLLWTLVGATYLLNFSQLTRRLRGMPAVASAAASGMVVLSAFSFKLAFTHEDSPELVTGVPAAINVALQGLTLVTRARIVFVGIGALAGYSTYIALSKPSEAAQTAKLLHHLITLLVATQSRVTNIPLLLLFNVQLAFISSLGLDLPTLSTSSILLQFTSFFAFGGTNAISSVDLSSAYNGVAGFNVVAVGILTFVSNWAGPVYWTSATNLLLLRYRKLHNSRNVFLQHVGHLTLFTACSVLFVMVACEVLRTHLFVWTVFSPKYLYSMAWSIGQHLAINVAVAGLLYKLGATY

SEQ ID NO: 381 - DNA, 1668 bp, Rhizoctonia solani
atgatgtcagcaactcctcccttcatgctactctggcctttgctagcagcattcgcgtcgcttgttcgagcacaggacagagagacgttttcagagcaactatgggttgaaccttttcacgacggaaaactacttgcccaattcgaatttctaaccgtactgaatgatgtcccgaggaggcctgacacgttgaacgtcgaggattcatcccagcactatacggtcgttccccttgctctgggccaaatattacgagagtattctgtgactgagctccatctttcactcaacgctggaaaatggaactacaagagttggggcgtaccacttgtcccaagcacggcttctggagccgagctttgggcatggatgggccacactcacaatgacaccaccgaactgatcgacgcacgttggcatggcctcaccaatgcgcttgctgggttattttgtgcctctctcggatccatggacgcacgccgcacaataattccggatattgcttttcggccagaaggcgacctgcctcaagactaccctcatagtctacgctatgcggctattccatctgaaaatgtgtgcaccgagaaccttaccccctttgttaaactcctcccatgcaaggctcacgccggaatcgcttcgcttctcaaccctcaccgcttgtttgacgccgactggcatggcatgagcatcgccgttcggtggttggagaataccggcatagagttgcgattagggtttggcgcgatcatggatcccgtcagattaagtgaagatagcatgcgccgagactggtcgttccaatctctctttggacgagcattgcacaagtcatgcctcattgcgtcaaagagcaaagttctcgttgggatgggtcccacaagtgaaggctccgcactcgttccatatgggcataagcttctgaagactagtgacaccaggagtttggcaatttacgatgtgggacataacacggaagagttccagctctcccaacagtgggtggatgaaaaacagttttcctatagatccgtgccgccacaattgcctatcaccgtacgtcgcgtgttaaccggcgcagagcaaacacatggcggtctgctcctgagcattaccaatgagggagatacacagtttacaaccgcctggctggaaaccatgccttggttcattcagttcttcctccacactctggaacttcgcgtaggtgggcagcaacgagatgatctcctgtcgcatttgacctttactccgccacgagatgatcttcgacgcgcctctatgctggaagccatattatctgtaccgccacatagcacgcttgatgtcaaggtttccttccgcaaggcattcatcctatatacagaacatccacctgacgcacaccgcggatgggatcttccagccgctgtcctaacccctctctgcagcaaccaaagtgcttcgagtaacacggggttgatacatccctatggcctgggcctttcggacacgtgcggttcacgtctatacacttcgacacttttagtagacctcgccactccggactttagtatgccttacaacgtgatcatcatgacaagcacggttgtcgcgttgttctttggcagtatatttaacctgttgactaggaagtttgtggtagtccgcgttgcaaaggcgtaa

SEQ ID NO: 382 - protein, 555 aa, Rhizoctonia solani
MMSATPPFMLLWPLLAAFASLVRAQDRETFSEQLWVEPFHDGKLLAQFEFLTVLNDVPRRPDTLNVEDSSQHYTVVPLALGQILREYSVTELHLSLNAGKWNYKSWGVPLVPSTASGAELWAWMGHTHNDTTELIDARWHGLTNALAGLFCASLGSMDARRTIIPDIAFRPEGDLPQDYPHSLRYAAIPSENVCTENLTPFVKLLPCKAHAGIASLLNPHRLFDADWHGMSIAVRWLENTGIELRLGFGAIMDPVRLSEDSMRRDWSFQSLFGRALHKSCLIASKSKVLVGMGPTSEGSALVPYGHKLLKTSDTRSLAIYDVGHNTEEFQLSQQWVDEKQFSYRSVPPQLPITVRRVLTGAEQTHGGLLLSITNEGDTQFTTAWLETMPWFIQFFLHTLELRVGGQQRDDLLSHLTFTPPRDDLRRASMLEAILSVPPHSTLDVKVSFRKAFILYTEHPPDAHRGWDLPAAVLTPLCSNQSASSNTGLIHPYGLGLSDTCGSRLYTSTLLVDLATPDFSMPYNVIIMTSTVVALFFGSIFNLLTRKFVVVRVAKA

SEQ ID NO: 383 - DNA, 1557 bp, Rhizoctonia solani
atgcttacctccaccacacctcagacccctcggctttccaccccgtcatacccgcatgacaaagggcggttcaaaattatcatcgcgtactggttggttcttatagctgcgggacctgcctggtgggtcctaactacagtccaacgccttccgttaccggaggttcgagtgaaggaagcaagttctcaatcggtccgaatacccattgatgtcaatgtcgacgttactgacgggttatgtgacgcgactatgctggcggccaagttgcagattagttgggacaaaagtcatggtacagaactacacgacatttggaatgtactagacgttcgaataggtgcacttggttctcatcgcccagatacgtcccgtactacttacaacgttactgttcggtatggctatgacgatgaccctgcaattgtgcacgaccgttcctttgaattattcagccgcagtggatgtaacgagcaacttgtgggcaaagtggcctcatctttgagagctcttctggcgccaccaacccaaaacacggaacttcgagttgcccagtattctccaaaatataggctcgcttttagcctactcaatgaagacgctgcttatggaggtgctatttctggatggtcagtcgaaacggccattaaagagtacctacaacctaccttggatgaactcaatatccttcacaactttacgattgaaagtcaggttcaattttacgcacctctgacaaccgaaccgattgcggctcaagatggttatgccctcaaccaagaacaacttacaatatttgtcaactcggcagaatggacgttgtcttcgagtgtctcgaatgaccctgttttgcactttgttctcttcgtcccatctcttgctaggcgaccgctgtacatacaggatgttcaagataactcagggaaaataacccagtttaactcgtttcttcttccacaatggggcggagtagctatcatgaatcccaagtctgacggaacggccaattcagtgttgacgctccaggaccttagaccgattttccacatcttcaggaaacaactcgagggattactgggcgttcctgtgctccctcctcccgtcggccttcagctagatcgtggggctgtatccaagcaagttcttaccggctggcagctcgatacgctcttacgaaggcgcgccctggaaaacattcgaggcagcgttcagaccttgaacagtataattgatcttacagggcagattgaaaatatgcctattggactgagcgtgaggaatgacatattgagtgcgcttgaggaattatcccaggtgcgtgagactgggtgcgcgcaaacgttgactcactcggcgttgtcgctccaatttgcaagccgggcattctttaatcccagtatggttggacttctatactttcctgccgagcacaagtatgccgtatacacgcctctatttgcccctatcgccgtaccgctggtggtgtctgtaatcagggaactgaagtctagacgtaagggtgtggcctcgacgggaaggtcgagacccaaggccgagtag

SEQ ID NO: 384 - protein, 518 aa, Rhizoctonia solani
MLTSTTPQTPRLSTPSYPHDKGRFKIIIAYWLVLIAAGPAWWVLTTVQRLPLPEVRVKEASSQSVRIPIDVNVDVTDGLCDATMLAAKLQISWDKSHGTELHDIWNVLDVRIGALGSHRPDTSRTTYNVTVRYGYDDDPAIVHDRSFELFSRSGCNEQLVGKVASSLRALLAPPTQNTELRVAQYSPKYRLAFSLLNEDAAYGGAISGWSVETAIKEYLQPTLDELNILHNFTIESQVQFYAPLTTEPIAAQDGYALNQEQLTIFVNSAEWTLSSSVSNDPVLHFVLFVPSLARRPLYIQDVQDNSGKITQFNSFLLPQWGGVAIMNPKSDGTANSVLTLQDLRPIFHIFRKQLEGLLGVPVLPPPVGLQLDRGAVSKQVLTGWQLDTLLRRRALENIRGSVQTLNSIIDLTGQIENMPIGLSVRNDILSALEELSQVRETGCAQTLTHSALSLQFASRAFFNPSMVGLLYFPAEHKYAVYTPLFAPIAVPLVVSVIRELKSRRKGVASTGRSRPKAE

SEQ ID NO: 385 - DNA, 1305 bp, Phytophthora parasitica
atgccgcgagtgggtctacccgccgtgctgctgctaggcgcgtgcgtacgcgccttcctgtacgttgtgccgtccatccacgtgactttatcaacccgccccgagctgtccacgtctatctcgtcatttcaccgcctacaggagggagtatttctcttccaaactaccggttcgccctactctggggacgtttatcatcaacccccgctgctcttcgctctgctgtatccagtgctgcaggtggccccagcgtctctccaatattttatcatatgcaccgtattcattctcgtggatctactacttgccatgggcttcgctcggctctgtaagaggaatttgaagctggaagagggacgtcgcttcacgtttcaggataaggaggtttggcttaccttagtgcccgtttcgccgctgtttaaaccgaaaaatctgccaacgacagtggcttttattgcactgatgaacccgtattcactggcatcaagtgtagccatgtcatcagtgggctttacacacttggcagtgctctacagcttggtcttcgcctcggaaggagctcttgctgcgtcaatgatgtgtgtggcggtgggcacgtatctatcggtgtacccattcttcctgatgatacccattgtgctgctactacgctcagtcaaagactcgtctttggtgtcgctagtagtaaaatgccttatagtagttatcgcctggctgggtctgctgttctacttgtcgtggagtttgactggaggttggggatttttggaggaaacttacgtgtgggtggcgaaatactcggatttgaccccgaacattggcatcttctggtacttcttcatggaagttttcgaccgctttatcccatatttcctcttcgtgctgcacttgcacccagtcatctacatcgtcccgatctacctgcgcttggcacaccggcctcaagcctacgcttgtgcgttgatcggcatcttttctctattccaggcgtatccctcctttggagactttggattcttcctttcaatgctggcgatgcacccgaagacgataatgacgatcgaaaaccggtttgtctacgtgctcggcttgggtgtggccacgtgcatgctgcccgtgatgtggttcttgtggttgttcccggcctctggcaacgcgaacttcttctacaaccagacgttggtgtaccagatcttcaatactcagatcattacagcgttcgtaggagccaccatgaaacgcgacaaggatgtggacaagtaccgggccagtcgcttgaaacaactggagaaaaccagcgaataa

SEQ ID NO: 386 - protein, 434 aa, Phytophthora parasitica
MPRVGLPAVLLLGACVRAFLYVVPSIHVTLSTRPELSTSISSFHRLQEGVFLFQTTGSPYSGDVYHQPPLLFALLYPVLQVAPASLQYFIICTVFILVDLLLAMGFARLCKRNLKLEEGRRFTFQDKEVWLTLVPVSPLFKPKNLPTTVAFIALMNPYSLASSVAMSSVGFTHLAVLYSLVFASEGALAASMMCVAVGTYLSVYPFFLMIPIVLLLRSVKDSSLVSLVVKCLIVVIAWLGLLFYLSWSLTGGWGFLEETYVWVAKYSDLTPNIGIFWYFFMEVFDRFIPYFLFVLHLHPVIYIVPIYLRLAHRPQAYACALIGIFSLFQAYPSFGDFGFFLSMLAMHPKTIMTIENRFVYVLGLGVATCMLPVMWFLWLFPASGNANFFYNQTLVYQIFNTQIITAFVGATMKRDKDVDKYRASRLKQLEKTSE

SEQ ID NO: 387 - DNA, 3045 bp, Puccinia striiformis
  misc_feature: Puccinia striiformis f. sp. tritici
atgatattagtatggctaacgatttcaagtatcctgatcacgacatgtacgatccgatcattaatggacccacaccaagcgcaagacctcgaaggtttcagtgggccgagtgtctctaaagatgggaggattaccaatggaggtgggatgggcaaaggggctggtagttgtagaatgagttggatgaatcctggttatcttcgactggactcggtccatagtcgattgacagataagtattctctctttctttatcgcgaatcaggcttagatttggaagaacagccttctcgatctccagtcctatatatcccaggaaacgcaggctcgtttagacagatcaggtcgcttggctctacgacgagccacctggcccagtccatctaccatacccgaggacacccagggctagacttcttcaccctagatttcaacgacgatttctcggcgttccatggccagactttgctcgatcaagccgaatatacaaacgatgcgatccgaactatcttatcactatacacacaatccagattggttcggaatagtcatttacctgtacctacttcagtgctcatacttgctcactcgatgggaggaatcgtcgctcgaaaatcggtcactttggataaccatcctcgagatactatcaatactatcatctcactcagctctccccattcgatccctccactcactttcgataaccgaatcgaagcagtttatgacgatgttaataaactatggagggagcattattcatctcaatcgaacactagcactcttcttaaagacatgattctagtctcgatatccggcggaagttcagatacgacaatctcgtcagattcgagttcattgacttcactcgctccctccaactcgagtcttactatcttcactaccggcatccccggcgtgtggacccccatcgatcatctggctattatgtggtgtaatcaattaactagagttatcgccaatgctttactcgatatcactgatcctagaatccctaatcaagtcaaaaaagatcgccttaacattctcaaaaaacatctcatccttggtcatggaatctcctctcttgacgatgatgacgatctgttcaaatctcaagattcagaccccgcttatcatctccatcctccctaccaatccctcagattgaccaagcctgatttggatgtggacactcacattattccactcccgtcatcattctctgaagaagagtacgaattcaacctgctctcgagtctagtccgattgaaagtcctagtttgtaatggtacattcgaaattgacgccctaagatcatgtcactctatccattctcaattcattcctcgctctcaattcaatcctccattcgtatcccaacctggtcccaatgaccagctcgtcgaaccagctcccgtcaacaactttattcagattcacaaatctcaactctctcgctcgaatttcttggccattcaagtttatcaatctagtggtgatgatgacgatcagttcttgataagcgaattcaagaaagctactactccgattctaacctcgtcatcgttcttgaaattcagtttattcgggcaatctattcgtttacatcatgcccaaattaaattagtaaatcaaattcaagtacgaggattgaagagttcattaatagcatatcaattgaagtttagtcgaggggggaaatgcagaacaaatgaaaatagtttgtttgccccgttgatgaaacgagctagtgaatcgatcggagatattaagtatttcccaaacattaaagaagctgtactttatactcatctttcgaatgcatatacaccaactcgacggaaatctacagatgatgatcagatcgaggacggtgttggattaacgttttggatcgatcctttgttgtgtagtactcctaagcatgaggaggaagaggaagaggaagaagaagagtctgggattaagattgagattaagttggacattaatcatactttgaaacggatcattttgagatacaggaccggattgatctcgtttccagtcggattattatcgatcatcttaggttctcaattctcaaccactactaacaatgaccgtaaactgacaacgaagacaaggagggtgggggggatcttgagtaaattggtgactgaagacctggtcaagatcttggcgataatcggaatagcccaaaccatacaatctatagttctacaaagaatgggttctggtagtactagttctgagggatttcagttggtctatcctccccgattcatttctgatctgttgcttggtttggatcagttcgagttcatcttactcgattggtgctttatctttctctcgattgggtggattcacttcctctgtatctgccttcatctccttctgagagcgatcgcacatctatggatccgtgtctccccttcttcttcttcttcttcttcgatggaaaaactcgatcggattcctttcagctaccgttctcgatcaagtaccactcctcttatcgattatcagacattggtattcctgctcatcttggctatcttcattacaagctatgcgccctatcacttcggcttcctcatcctcacgaccatacaactagtgaccacattccaatacatactattggatatcagatctaggattaatgagcgaaaaaggatggtcgagtataatttgacagttctgttgatcatgatctggatctctccgattagtattactacgtgtttggtctggttgaggaacttgcaggagggctggtacgccccgtttcctgatggtagaaatgtatttaaggttattgggttcatgggcttggtttatttgaatcggatcgattatcgttctaggaagtcaaagattagtttgcttggaaacagtcgaatcctggaatggatgttcaaggtgatcgggttgttcagtattctgtatggaatcagatatactttcaaagttttcgaatttcttaatcttggttttatgtttctgtgtttgatgatgtgctattttatcaagtaa

SEQ ID NO: 388 - protein, 1014 aa, Puccinia striiformis
MILVWLTISSILITTCTIRSLMDPHQAQDLEGFSGPSVSKDGRITNGGGMGKGAGSCRMSWMNPGYLRLDSVHSRLTDKYSLFLYRESGLDLEEQPSRSPVLYIPGNAGSFRQIRSLGSTTSHLAQSIYHTRGHPGLDFFTLDFNDDFSAFHGQTLLDQAEYTNDAIRTILSLYTQSRLVRNSHLPVPTSVLILAHSMGGIVARKSVTLDNHPRDTINTIISLSSPHSIPPLTFDNRIEAVYDDVNKLWREHYSSQSNTSTLLKDMILVSISGGSSDTTISSDSSSLTSLAPSNSSLTIFTTGIPGVWTPIDHLAIMWCNQLTRVIANALLDITDPRIPNQVKKDRLNILKKHLILGHGISSLDDDDDLFKSQDSDPAYHLHPPYQSLRLTKPDLDVDTHIIPLPSSFSEEEYEFNLLSSLVRLKVLVCNGTFEIDALRSCHSIHSQFIPRSQFNPPFVSQPGPNDQLVEPAPVNNFIQIHKSQLSRSNFLAIQVYQSSGDDDDQFLISEFKKATTPILTSSSFLKFSLFGQSIRLHHAQIKLVNQIQVRGLKSSLIAYQLKFSRGGKCRTNENSLFAPLMKRASESIGDIKYFPNIKEAVLYTHLSNAYTPTRRKSTDDDQIEDGVGLTFWIDPLLCSTPKHEEEEEEEEEESGIKIEIKLDINHTLKRIILRYRTGLISFPVGLLSIILGSQFSTTTNNDRKLTTKTRRVGGILSKLVTEDLVKILAIIGIAQTIQSIVLQRMGSGSTSSEGFQLVYPPRFISDLLLGLDQFEFILLDWCFIFLSIGWIHFLCICLHLLLRAIAHLWIRVSPSSSSSSSMEKLDRIPFSYRSRSSTTPLIDYQTLVFLLILAIFITSYAPYHFGFLILTTIQLVTTFQYILLDIRSRINERKRMVEYNLTVLLIMIWISPISITTCLVWLRNLQEGWYAPFPDGRNVFKVIGFMGLVYLNRIDYRSRKSKISLLGNSRILEWMFKVIGLFSILYGIRYTFKVFEFLNLGFMFLCLMMCYFIK

SEQ ID NO: 389 - DNA, 2001 bp, Phytophthora infestans
  misc_feature: Phytophthora infestans T30-4
atgtccgagaacgcactgctaattgacctaatggaggcacgagctagtcatcaggaagcgcattcggcccgaaaatttcaccagaagctgctagagctgcctgacttgccttctaatggctgccgggccaattgctcgcacgtcgtggactggatcgacgcgcaactgcgcagtctggaccgtgttgaagcctacagtcaagttttccagacggatgaggcgtcatcgccccgtacgaacgtctacggcatcctcagggcctctccgctggctgatggcaaggtatgctgctctgaagcaattgtgcttgtcacacactaccgaaacgtgggtgcagacagcggcgagaacacggggctctcactgggcttagctctactcaagtacctttcgagggcgaaatggctggctaaagatgtgattctcctcgctgcagacgatggcaagctggatggaagcgatgggtacgctcctggcactgaagcctgggtacaagcgtaccatctggaccctatagacagcggtctgcagggtgttctaccaatgagagctggcgtcattcgggctgccgtcaacctggagactttgtacgactcacgtcaagtggattccgtcgggatttacacggctgggatgaacggccagctgcccaacttggacctcgtcaacaccgctgtacgcgcactccgtcagcaccaaattcctacgattttggaccgatctgacgtccagcatgacggtgcacacaagagcgttgtggcaagtgcgctagggttcgtctcgagtttgaacgacaagttttccccaccggaatacaaggaaaagactcgaagctacctgacgaacctcaagggaatgctgcacttcatgacgacgctggcgacggggccctcgggtcctcacgccaacttcatcagctacaatatcgacagtatcacgctgtccttgacacagagtcaggcctcaacaaaacgtccacttgtctcccgggacattctgcgctcgatggagatggtgattcgagctctgagcaatgtggaagagaagctgcaccagtcgttcttcctctacgtcctgcccagcacgtcgacttttgtatcggtgggcgagtacatctacgctgtgcttctggtgatctcgccggcgatcgcgcacttgctgtacttggcgaatcagacgactgggatgcgagttgcgctggcactgacggtattcctggcggtcgaagccctttgtgtgcttggtctcattgcgatctgcaagtatttcgccacttctactgcgctgctgcagacatttaactccagtgacacgtccgctacgaggtggtttatgctggcgatggggatatctgcgactcaggctttgattgtactggtggccatgccggcgctgcgttctgtgtcgggcttttcgggctgtgtggagatattcgactggaggaagagggttacgacgtatgaagcgaaagagcagaggaaggtttcaccagacaaggaaatggagaagacggtcgaggatacggacgtcccagcgctggattcaggctggcgtgcgatcaaattcgttactatggcggtgattgtatacgcacactgcattctgggcatcttaaattatccgatggctctcttctgcgccatcccgatggcccatttcgcccgcgtggtcccttttggcactgcgacgttgcccaggaatgttgggaatggcttgtggctctttttgtcgtccccactgactctctttgtgttgctgaactggagtggtctaggtacgattcgtatttctaatgtctttcgatttttcggactaaagctgtgtgtattttgtgtgtctacagatgtggtcgctggtttgtcatataccgtcgacagcttcgctcagcggatcaacctgctggctttagcgtatttctgctgcatctacgtctccgtccacactttgtccttagtggtttggacatatctgagcatcgataaaaaacaaaagctggaatga

SEQ ID NO: 390 - protein, 666 aa, Phytophthora infestans
MSENALLIDLMEARASHQEAHSARKFHQKLLELPDLPSNGCRANCSHVVDWIDAQLRSLDRVEAYSQVFQTDEASSPRTNVYGILRASPLADGKVCCSEAIVLVTHYRNVGADSGENTGLSLGLALLKYLSRAKWLAKDVILLAADDGKLDGSDGYAPGTEAWVQAYHLDPIDSGLQGVLPMRAGVIRAAVNLETLYDSRQVDSVGIYTAGMNGQLPNLDLVNTAVRALRQHQIPTILDRSDVQHDGAHKSVVASALGFVSSLNDKFSPPEYKEKTRSYLTNLKGMLHFMTTLATGPSGPHANFISYNIDSITLSLTQSQASTKRPLVSRDILRSMEMVIRALSNVEEKLHQSFFLYVLPSTSTFVSVGEYIYAVLLVISPAIAHLLYLANQTTGMRVALALTVFLAVEALCVLGLIAICKYFATSTALLQTFNSSDTSATRWFMLAMGISATQALIVLVAMPALRSVSGFSGCVEIFDWRKRVTTYEAKEQRKVSPDKEMEKTVEDTDVPALDSGWRAIKFVTMAVIVYAHCILGILNYPMALFCAIPMAHFARVVPFGTATLPRNVGNGLWLFLSSPLTLFVLLNWSGLGTIRISNVFRFFGLKLCVFCVSTDVVAGLSYTVDSFAQRINLLALAYFCCIYVSVHTLSLVVWTYLSIDKKQKLE

SEQ ID NO: 391 - DNA, 999 bp, Phytophthora infestans
atgacgacgctctcgctctcgttctgggtgccgctgctgctgctactaagctgcgttttcggggagcactaccaccgccacacgaataattgggcggtgattgttgatacgtctcgcttctggagcaactacagacacgtggccaatgcactgtcgctttatcactctgttaagcgtctcggtatcccggacagtcagatcatcctaatgctggcggaccaaatgccatgcaatgctcgcaactgtttcccaggacaagtgttcaatagtcgaacgcagaagatcaacctctatggtaagaacgtcgaagtagactatcgcggttcggaggtgtcggtcgccaactttatcaccgtcctaacgggccgccatgagcctgggacgcctgcatcgaagaagttggacacggacgagaacagcaacatcttcctttacatgtccggacacggtggcgacgggtttctgaaattccaggactttgaagagatgtcgagccaggaccttgccgactctattcaggaaatgcatgtcaagaagcgctacaacgaaatcttcttcatggtcgacacatgtcaggcaggctcgctgtccaatgctctcgaatcccccaaagtggtaaccatcggcagctcgcagacaggcgagaactcgtacgcccaccactccgactttgagttggggctctctgtcatcgatcgctttaccttctcgacgctggactacctccaacgcatgaaggtcggcgactccatccgcaacgggactctccgggacctcttcaacttttacgacccgaaaatgcttctgtcgacacctgactaccgaactgacatcttaggccgctccattgacgaggtacccatcacagacttcctcggttcaatgctggatgtgcatcttcacttcgacgacgaagcctttgagtttaccaacgactttttcttcggagtcgctgcagctgtgatcggtgccgtggtcgtgaccacgaaagcgatctaa

SEQ ID NO: 392 - protein, 332 aa, Phytophthora infestans
MTTLSLSFWVPLLLLLSCVFGEHYHRHTNNWAVIVDTSRFWSNYRHVANALSLYHSVKRLGIPDSQIILMLADQMPCNARNCFPGQVFNSRTQKINLYGKNVEVDYRGSEVSVANFITVLTGRHEPGTPASKKLDTDENSNIFLYMSGHGGDGFLKFQDFEEMSSQDLADSIQEMHVKKRYNEIFFMVDTCQAGSLSNALESPKVVTIGSSQTGENSYAHHSDFELGLSVIDRFTFSTLDYLQRMKVGDSIRNGTLRDLFNFYDPKMLLSTPDYRTDILGRSIDEVPITDFLGSMLDVHLHFDDEAFEFTNDFFFGVAAAVIGAVVVTTKAI

SEQ ID NO: 393 - DNA, 1282 bp, Alternaria solani
gtgcttcagaatcatctcgacaccgtcttggtcgatttcgttggtgggctggaagccactcccagcaccattcctcgttgtcttggattccttggcgcgtcgctcttttctgttgccggtagacatggtggtggtggtggaggtgctgggcagtgtagtggtagggtcgagcacgtcgcgtgtttgcccttgataatctccagatgacgtgggtcaaagctcgttccaggaccccagtgagcttcgatatgccgacgcgctacctcgcctgacttgcattggcagacgacaattgcgattccaacatatccaccgtgtaccctgtatgccattaccgaagatgaattggactatatgggcatcggtgcccgtccttgttttcgtcttctggatgtttaccagcactctcagcgcttcgttccccacattacagaacaaacgcatactgctgctgatagcgcatcctgacgatgaggccatgttttttgccccgactttgctggcattgacgcgtccagaacgcggaaatcacgtcaagatactgtgtttgagtagcggtacggcgtgcacatatcccgcatgctctcaaacgcaaccactaacttcaatcgtacaataggggatgccgatggccttggtgaaattcgcaagaaagagctggtcaaaagtgggctgcagctgggaatcggaagcaaggaggatattctcgttgtggaagacaggtacgcaccgcaatgcaacgctggatggctgcgacatgctgatcattgcccaggaacttcccagattccatgacagtaacatggcaccctcgtctaatctccaatctactcaccaccgccttcgctccaaatatggcctcaatctcttccaaggaagcaccgcaggcgaccgtcgacgccataatcaccttcgatgcacacggcgtctccgaccaccccaatcacaaatcgctccacgacggagcgcatacgtttctaaaggcactcgtgcaccgacacagcgggtgggagtgccctgtcaagctgtacaccctcaccaccacttccatattccgcaaatatcttagcttattggacgcgcctgctacaataattggcgcaatcatccggaaaaaggagcttggagactttccagctccgctcttgtttgtcagctcaccggccggttacaggactgcccagagagccatgaccacggcacacgaaagtcagatgcgctggtttcgttggggctggatctccttgtcgcgttacatggtgctcaacgacctgaagaagga

SEQ ID NO: 394 - protein, 290 aa, Alternaria solani
VLQNHLDTVLVDFVGGLEATPSTIPRCLGFLGASLFSVAGRHGGGGGGAGQCSAHPDDEAMFFAPTLLALTRPERGNHVKILCLSSGDADGLGEIRKKELVKSGLQLGIGSKEDILVVEDRNFPDSMTVTWHPRLISNLLTTAFAPNMASISSKEAPQATVDAIITFDAHGVSDHPNHKSLHDGAHTFLKALVHRHSGWECPVKLYTLTTTSIFRKYLSLLDAPATIIGAIIRKKELGDFPAPLLFVSSPAGYRTAQRAMTTAHESQMRWFRWGWISLSRYMVLNDLKKE

SEQ ID NO: 395 - protein, 168 aa, Phytophthora infestans
MLFDLGEDELQTLLDMFKYILLGTNVLLFFTAALVFFTSSANQNSTSSSTPAQFKQALIVTAHPDDESMFFLPLVYSLQQQQEGSNEVWKTHLLCLSRGNFDGLGDVRVKELKACATYIGLSTDHVKVLEDPKLQDGMKNQWDVEHIAAIVTDYIVKNQIDAVRLYLR

SEQ ID NO: 396 - protein, 206 aa, Phytophthora sojae
MFFLPLVHSLQQPQESSNDKWITHLLCLSRGNFDGLGDIRVKELLACATYIGLSTDHVKVLEDPQLQDGMKNQWDVAHIAAVVTEYMEKHNIDAVFTFDDYGVSGHANHIATHYGVKQAKTKVVRGWALESTNILRKYVGLLDAALSYWLARRKEDEKEEERQFVFVCKPRWNYNAMALHRSQFVWYRRLFVAFSRYTFINTFRSL

SEQ ID NO: 397 - protein, 431 aa, Phytophthora ramorum
MSEAKPKPLPMARRALLRLRGYVASRCLSLCWVTYILGLFWLLLHPAVTVTTGELKCRGTYMSENALLIDLMEARASHQEAYSARGFHQKLLELPELPFGGCGDNCSAIVNWIDIQLRSLDRVEAYTQVFKTNEASEPRTNVYGILRASPLADGKEAIVLVTHFRNVGAGSGEYSGLALGLALLKYLSRAKWLAKDVVLLAADDGRLDGSDGYAPGTEAWLQAYHLDPIESGLQGVLPMRAGVIRAAINLETMYDTRQVGSVGIYTAGMNGQLPNLDLVNTAVRAFRQHQISTILDRADAAPLNDTKQEDYVSSVLDFIAGLNDKYAPEEYKQSAQNYLTNLKGMLHFMTTLASGPAGPHANFISYNIDSITLSLTKSSTSGDRPLSTREALRSIEMVVRALSNLEEKLHQSFFLYVLPSTTTFVSVAECA

SEQ ID NO: 398 - protein, 656 aa, Phytophthora sojae
MSDAKPKPPPKARRALLRLRGYVAARCLSLCWGTYVLGLVWLLLHPVVTVTTGELKCRGTYMSENALLIDLMEARASHQEGNSARSFHEQLLEVPDLPAGGCGDNCSLVVDWIDAQLRGLDRVEAYCQEAIVLVTHYRNVGKDSGDYSGLSLGLALLKYLARAKWLAKDVILLAADDGVLDGSDGYALGTEAWLRAYHLDPVESGLQGALPMRAGVIRAAVNVETLMNSKEVGSVGIYTAGMNGQLPNLDLVNTAVRAFGQHQIPTILDRADAAQVGGRNHKGYVSSVINLISSLSEKHTPEEYKQSAQNYLANLKGMLHFMTTLASGPSGPHANFISYNIDSITLSLVKSVGSSDRSLSTREVLRSIEMVVRALSNLEEKLHQSFFLYVLPSTTTFVSVGEYYYTVALAISPAIAHLLFLANKTSGMRVAFALSVFIVVEGLCALLLVGVSRYFASPAALLGVHALRSVVGFSGCVEIYDWRKRIVVYDAEQQKRLDQEKEGSTDSPAELSESSNDIPELDSGWRAVKFITMAMLVYAHCILGILNYPMALFCAIAMTHFARVVPFSTASVAKNVLNGLWLFVSSPLVLLALLKWSRLDHASALSTVVSSFVHRINLLALSYICCIYVSVHTLSLIIWAYPAPKAAPSARKWKQE

SEQ ID NO: 399 - protein, 387 aa, Phytophthora sojae
MARLTLSLWVPLLLALGCVCGEEYHRHTNNWAVIVDTSRFWSNYRHVANALSLYHSVKRLGIPDSQIILMLADQMPCNARNCFPGQVFNSRTQKINLYGKNVEVDYRGSEVSVANFITVLTGRHEPGTPASKKLDTDENSNIFLYMSGHGGDGFLKFQVHRACVTPMSQDFEEMSSQDLADSIQEMHVKKRYNEIFFMVDTCQAGSLSNALESPKVVTIGSSQTGENSYAHHSDFELGLSVIDRFTFSTLDYLQRMKVGDSIRNGTLRDLFNFYDPKMLLSTPDYRTDILGRSIDEVPITDFLGSMLDVHLHSDDEAYPIEASPVSAAPSPKASAIDEASDLLATSSQRGGSFSTPTCAQCFQFSKEFLAGVVAAVVGAVLVTTKGV

SEQ ID NO: 400 - protein, 451 aa, Phytophthora ramorum
MQRGSLWLYSELLLLLEVVGIRQVGSGNLNLATTILLESLVTVVPTMIGFSFTEYEVPLVVMVYALAAMLCALSRFHAKEFIHKHCRKEKMNQLLEKELPFLTNFRAQIMISTCFAILAVDFTVFPRRFAKTENYGFSVMDIGVGAFIVSSAITSAPARQARPNASTKRSSLEDKPTPSLLSKCYAFLRPIALVLIFAIARFLTVKGVNYQEHVSEYGVHWNFYFTLAGVYLAYSFLQAFGKWATNPVAAILIAFGYQTYLSQYGGEEYILDAPRDNLMSQNREGILSLAGYTSLYMLAVYAGQSIFSYMDTNGAKLQRNMRWLVISLFAVAGLLWLSTFLSVQLVSRPSRRMLNLSYLLWVMAESITLLALYCGIQTLSMLPRVPLLFQGINHNQLFVFIVANLMTGAVNLSMHTINTEPAIACAVLLAYMLVVCVLASVLQHAGVRIKL

SEQ ID NO: 401 - protein, 10 aa, Artificial Sequence
  GPI12 consensus sequence
AHPDDEAMFF

SEQ ID NO: 402 - protein, 13 aa, Artificial Sequence
  GPI12 consensus sequence
ILCLSSGDADGLG

SEQ ID NO: 403 - protein, 13 aa, Artificial Sequence
  GWT1 consensus sequence
  misc_feature (7)..(7): Xaa can be any naturally occurring amino acid
GTSLMDXGVGSFV

SEQ ID NO: 404 - protein, 15 aa, Artificial Sequence
  GWT1 consensus sequence
  misc_feature (3)..(3): Xaa can be any naturally occurring amino acid
HVXEYGVHWNFFFTL

SEQ ID NO: 405 - protein, 20 aa, Artificial Sequence
  GAA1 consensus sequence
TYISENALLPGQVHTYFGGS

SEQ ID NO: 406 - protein, 13 aa, Artificial Sequence
  GAA1 consensus sequence
RYFKRWSLWSKDI

SEQ ID NO: 407 - protein, 14 aa, Artificial Sequence
  GAA1 consensus sequence
NNLLEHLHQSFFFY

SEQ ID NO: 408 - protein, 17 aa, Artificial Sequence
  GPI8 consensus sequence
NWAVLVCTSRFWFNYRH

SEQ ID NO: 409 - protein, 29 aa, Artificial Sequence
  GPI8 consensus sequence
VKRLGIPDSQIILMLPDDMACNPRNAFPG

SEQ ID NO: 410 - protein, 19 aa, Artificial Sequence
  GPI8 consensus sequence
YMTGHGGNEFLKFQDAEEI

SEQ ID NO: 411 - protein, 10 aa, Artificial Sequence
  GPI12 consensus sequence
  misc_feature (7)..(8): Xaa can be any naturally occurring amino acid
AHPDDEXXFF

SEQ ID NO: 412 - protein, 10 aa, Artificial Sequence
  GPI12 consensus sequence
  misc_feature (3)..(3): Xaa can be any naturally occurring amino acid
  misc_feature (5)..(7): Xaa can be any naturally occurring amino acid
LSXGXXXGLG

SEQ ID NO: 413 - protein, 13 aa, Artificial Sequence
  GWT1 consensus sequence
  misc_feature (2)..(2): Xaa can be any naturally occurring amino acid
  misc_feature (7)..(7): Xaa can be any naturally occurring amino acid
GXSLMDXGVGSFV

SEQ ID NO: 414 - protein, 15 aa, Artificial Sequence
  GWT1 consensus sequence
  misc_feature (3)..(3): Xaa can be any naturally occurring amino acid
  misc_feature (7)..(7): Xaa can be any naturally occurring amino acid
HVXEYGXHWNFFFTL

SEQ ID NO: 415 - protein, 20 aa, Artificial Sequence
  GAA1 consensus sequence
  misc_feature (3)..(3): Xaa can be any naturally occurring amino acid
  misc_feature (8)..(8): Xaa can be any naturally occurring amino acid
  misc_feature (18)..(18): Xaa can be any naturally occurring amino acid
TYXSENAXLPGQVHTYFXGS

SEQ ID NO: 416 - protein, 13 aa, Artificial Sequence
  GAA1 consensus sequence
  misc_feature (4)..(4): Xaa can be any naturally occurring amino acid
  misc_feature (8)..(8): Xaa can be any naturally occurring amino acid
RYFXRWSXWSKDI

SEQ ID NO: 417 - protein, 14 aa, Artificial Sequence
  GAA1 consensus sequence
  misc_feature (7)..(7): Xaa can be any naturally occurring amino acid
NNLLEHXHQSFFFY

SEQ ID NO: 418 - protein, 17 aa, Artificial Sequence
  GPI8 consensus sequence
  misc_feature (7)..(7): Xaa can be any naturally occurring amino acid
  misc_feature (10)..(10): Xaa can be any naturally occurring amino acid
NWAVLVXTSXFWFNYRH

SEQ ID NO: 419 - protein, 29 aa, Artificial Sequence
  GPI8 consensus sequence
  misc_feature (10)..(10): Xaa can be any naturally occurring amino acid
  misc_feature (16)..(16): Xaa can be any naturally occurring amino acid
  misc_feature (19)..(19): Xaa can be any naturally occurring amino acid
  misc_feature (26)..(26): Xaa can be any naturally occurring amino acid
VKRLGIPDSXIILMLXDDXACNPRNXFPG

SEQ ID NO: 420 - protein, 19 aa, Artificial Sequence
  GPI8 consensus sequence
  misc_feature (8)..(8): Xaa can be any naturally occurring amino acid
  misc_feature (16)..(16): Xaa can be any naturally occurring amino acid
YMTGHGGXEFLKFQDXEEI

1. A transgenic plant or a part thereof comprising as transgene a DNA capable of expressing an inhibitory nucleic acid molecule capable of inhibiting the expression of a gene involved in the glycosylphosphatidylinositol (GPI) anchor biosynthesis pathway in a fungus.

2. The transgenic plant or the part thereof of claim 1, wherein the gene comprises the GPI1, GPI2, GPI3, GPI15, ERI1, GPI19, GPI12, GWT1, GPI14, PBN1, GPI18, MCD4, GPI10, SMP3, GPI13, GPI11, GPI7, GAA1, GPI8, GPI16, GPI17, GAB1, and/or B ST1 gene(s).

3. The transgenic plant or the part thereof of claim 1 comprising as transgene an expression cassette comprising the DNA.

4. The transgenic plant or the part thereof of claim 1, wherein the DNA or the expression cassette is stably integrated into the genome of the plant or present in the plant or the part thereof on a vector.

5. The transgenic plant or a part thereof of claim 1, wherein the inhibitory nucleic acid molecule is an antisense RNA or dsRNA.

6. The transgenic plant or a part thereof of claim 1, wherein the DNA encodes an RNA molecule in sense direction and an RNA molecule in antisense direction, wherein the RNA molecule in sense direction or the RNA molecule in antisense direction are substantially complementary to the gene involved in the GPI anchor biosynthesis pathway or a part thereof, the RNA molecule in antisense direction is substantially reverse complementary to the RNA molecule in sense direction, and the RNA molecule in sense direction and the RNA molecule in antisense direction are able to build a dsRNA.

7. The transgenic plant or a part thereof of claim 5, wherein the length of the antisense RNA, the dsRNA, the RNA molecule in sense direction or the RNA molecule in antisense direction is at least 15 contiguous nucleotides.

8. The transgenic plant or a part thereof of claim 1, wherein the expression of the inhibitory nucleic acid molecule is controlled by a promoter.

9. A DNA capable of expressing an inhibitory nucleic acid molecule capable of inhibiting the expression of a gene involved in the GPI anchor biosynthesis pathway in a fungus.

10. An inhibitory nucleic acid molecule capable of inhibiting the expression of a gene involved in the GPI anchor biosynthesis pathway in a fungus.

11. A vector comprising the DNA of claim 9.

12. A method of producing a transgenic plant or the part thereof of claim 1, comprising the following steps:
introducing into at least a cell of the plant a DNA capable of expressing an inhibitory nucleic acid molecule capable of inhibiting the expression of a gene involved in the GPI anchor biosynthesis pathway in a fungus, an expression cassette comprising the DNA, a vector comprising the DNA, or a dsRNA capable of inhibiting the expression of a gene involved in the GPI anchor biosynthesis pathway in a fungus, and
regenerating the transgenic plant from the at least a cell.

13. A method of conferring fungal resistance to a plant or the part thereof comprising the following steps:
introducing into the plant or a part thereof the DNA of claim 9, an expression cassette comprising the DNA, a vector comprising the DNA, or a dsRNA capable of inhibiting the expression of a gene involved in the GPI anchor biosynthesis pathway in a fungus, and
causing expression of the DNA, the expression cassette, the vector, or the dsRNA.

14. A method of inhibiting the expression of a gene involved in the GPI anchor biosynthesis pathway, comprising:
applying the DNA of claim 9, an expression cassette comprising the DNA, a vector comprising the DNA, or a dsRNA capable of inhibiting the expression of a gene involved in the GPI anchor biosynthesis pathway in a fungus to the fungus or to a plant or a part thereof.

15. A method comprising utilizing the DNA of claim 9, an expression cassette comprising the DNA, a vector comprising the DNA, or a dsRNA capable of inhibiting the expression of a gene involved in GPI anchor biosynthesis pathway, in a fungus
for inactivating the fungus, while contacting a plant or a part thereof;
for protecting a plant against an infection by the fungus; or
for inhibiting the expression of a gene involved in the GPI anchor biosynthesis pathway.
